United States Patent Application Publication US 2019/0144922 A1 - sequence listing, part 14

SEQ ID NO: 6 - DNA, 5241455 bp, Serratia marcescens (residues 1-1,747,152 of 5,241,455)
tttttttagttaatttactttctattaacacaaaaaacgcggctaattagcgacaatagagtaattgcatttagaaatagtcacgttagcaatcatgtgcgaaagattggcgtttgctgctaatgttaattggctgttggaatattgccccgctgcttgtcaataaaaggttttcatcgggtatacggattgtttttgaacagttaactagtaatgttttgatttatataattttttgatcgctcaaattgctaaagacggtttggttgaccatcggctataaatcaggaagggacattactgtgatcagcttcgcgtttctaaacgcaacgctggaataatcagacaattaaatgcgccctattattccgaccgttttcttgtgaaaataggctggaatagggaaatttaaataattgttcaccttttcgctacttatcgattgaattcgttggtatgccccgtataatttgctcgttttttgctgcttgactcaggacagcaaaaacagttgtatacgtcactcagcataccccctctggggtacggagagaacaaacgtcatgtctgtgtccctttacagcgggaaagtcgcacgcaaactgctgtttttgcagttaatgacttttgttctgatcagcgttgctttctggctgaaaagcccggaatggagcgcttcggcgttggcaggcggtctcgccgcctggttgccgagtgcaatgtttatgctgtttgccttgcgccatcaggcgcaaacgccggcgcccggtagggttgcctggtcgttcgccatcggcgaggggctaaaggtcgtgatcaccatcgttttgctgatcgtggcgctgggggtgttcaaggcggagtttataccgcttggcctgacctatttagcggtgttagtggtgcagatagtggcaccggccgtgattaacagttaccgaacttaactaaataagggtaagaggcatcatgtctgcaggagaagtcttgactccacaggagtatatcggtcaccacctgacgcagcttcaggtcgggactgggttctggtcgatcaacatcgactcgatgtttttctccgtcgtcctcggggcgcttttcctggtgatcttccgcaaagtggccaaaaacgccaccagcggcgtgccgggtaaactgcaaaccgccgtggagctggtggtcggtttcgtcgacagcagcgtgcgcgacatgtaccacggcaagagcaaggtgattgcgccgctggcgctgaccgtgttcgtctgggtgttcctgatgaacctgatggatttgctgcccatcgacttcctgccttacgttggcgaacacatcctcggcctgcctgcgctgcgcgtagtgcctaccgccgatgtaaacgtcacgctgtcgatggcgctgggcgtgtttatcctgattctgttctatagcatcaaaatgaaaggcgttggcgggttcgttaaagagttgaccatgcagccgttcaaccaccctgtattcattcctatcaacctgattcttgaaggtgtcagcctgctgtccaaacctgtttcactgggtctgcgactgttcggcaacatgtatgcgggtgagttgatcttcatcctgattgccggcctgttgccgtggtggtcacagtgggtcctgagcttgccttgggctatcttccacatcctgatcattacgcttcaagcctttattttcatggttctgacgatcgtctatctgtcgatggcgtctgaagagcactgattttcttaaaacacttgcacttttaaactgaaacaaactggagactgtcatggaaaacctgagtatggatctgctgtacatggctgccgctgtgatgatgggtttagcggcaatcggtgctgcgatcggtatcggcatcctgggtggtaaattcttggaaggcgctgctcgtcagcctgacctgattcctctgctgcgtacacagttctttatcgttatgggtctggtcgacgccatcccgatgatcgctgtaggtctgggtctgtacgtgatgttcgccgtcgcgtaagtagagcaaccctctacgacgtaaccaaactattaacttttaaagaggcattgtgctgtgaatcttaacgcaacaatcctcggccaggccatcgcgttcgttctgtttgtctggttctgcatgaagtacgtatggccgccgatcatggctgccatcgagaagcgtcagaaagaaatcgctgacggcctcgcttctgcagagcgtgccaaaaaagatctggacttagcgcaagccaatgcgaccgaccagctgaaaactgccaaagcagaagctcaggtgatcatcgagcaagcgaacaaacgcaaagctcagatcatggatgaagcgaaagccgaagccgagcaggaacgtaacaaaatcgtggcgcaggctcaggctgagatcgaagccgaacgtaagcgcgctcgtgaagagttgcgtaagcaagtcgcgatgctggcaattgccggcgccgagaagatcatcgaacgttccgtggatgaagctgctaacagcgacatcgttgataaactggtcgctgaactgtaaggagggaggggctgatgtctgaatttgtaactgtagctcgcccctacgccaaagcagcttttgactttgccgttgagcaccaaagcgtagagcgctggcaggacatgctggcgtttgcggctgaagtcactcgcaatgaacagatttctgaactgctgtctggcgcggttgcgccagaaacgctgtccaagacgttcatcgcggtttgtggcgatcggctcgacgaacatggccagaactttatccgtgtaatggccgaaaatggacgtttactggttcttcctgccgtgctgcagcagttcatcgaactgcgcgcctcgctggaatccaccgtcgaagtcgaagtgctctctgcgagcgcgctgaacgacgaacagcaggcgaaaatcgccgctgcgatggaaaaacgtctgtcacgcaaagttaagctgaattgcaaaattgacaagtctgtactggccggcatcgttgttcgcgccggcgatatggtgattgatggcagcgttcgcggtcgtcttgaacgcctgacagacgtcttgcagtcttaaggggactggagcatgcaactgaattccaccgaaatcagcgaactgatcaagcagcgcattgctcagttcaatgtagtgagcgaagctcacaatgaaggtactatcgtttccgtcagtgacgggatcatccgcgtacacggcctggccgaagttatgcagggcgaaatgatcgcgctgcctggcaaccgttacgcaatcgcattgaacctggagcgcgactccgttggtgccgtggtcatgggtccgtacgcggatctggccgaaggcatgaaggtgaaatgcaccggccgtatcctggaagttccagtcggtcgtggtctgctgggccgcgtagttaacaccctgggcgcaccaatcgacggcaaaggcccgattgagaacgacggtttctctccggtagaagctatcgcgccaggcgttatcgagcgtcagtccgttgatcagccggttcagactggctacaaatccgttgacgccatgattccaatcggccgtggccagcgtgagctggtgatcggtgaccgtcagaccggtaaaaccgcgctggcgatcgatgcgatcatcaaccaacgcgactccggcatcaaatgcgtttacgtggctatcggccagaaagcgtccaccatcgctaacgtggtgcgcaaactggaagagcacggcgcactggccaacaccatcgtggtggtggcgaccgcttccgaatccgctgcactgcaatacctggcgccatatgccggttgcgcaatgggcgaatacttccgtgaccgcggtgaagatgcgctgatcgtgtacgatgacctgtccaaacaggccgttgcttaccgccagatttccctgctgcttcgtcgtccgccaggtcgtgaagcttacccaggcgacgtattctacctgcactcccgcttgctggagcgcgcagcgcgcgtcaacgccgaatacgttgaagccttcaccaaaggtgaagttaaaggccaaaccggttcactgaccgctctgccgatcattgaaacccaggcgggtgacgtttccgcgttcgttccgaccaacgtaatctcgattaccgatggtcagatcttcctggaatccaacctgttcaactccggtattcgtccggcagttaacccgggtatctccgtatcccgtgttggtggcgccgcgcagaccaagatcatgaagaaactgtccggcggtatccgtaccgcgctggcgcagtatcgtgaactggctgcgttctcccagttcgcctccgatctggacgacgcgacccgcaaacagctgagccacggtcagaaagtgaccgagctgctgaaacagaaacagtatgcgccgatgtcggttgcacaacagtctctggtgctgtttgccgcagaacgcggttacctgaacgacgtcgaagtcgccaaagtggtgagcttcgaagccgcgctggtcgcctatgcggaccgcgagcacgccgaactgctgaaccacatcaaccaaactggcaacttcaatgatgagatcgagggcaagttgaaagacatcctcgagaccttcaagaaaacccagtcctggtaacgccgaacggtcctgctgttgaaagacagcaggccgtctggcactgaggagaagcagagatggccggcgcaaaagagatacgtagtaagatcgctagcgtgcaaaacacgcaaaagatcactaaagcgatggaaatggtcgccgcctccaaaatgcgtaaatcgcaggatcgcatggcggccagccgtccttatgcagagaccatgcgcaaagtgattggtcaccttgcgttagggaatctggagtacaagcacccgtacctggatgagcgtgacgttaagcgcgtcgggtatctggtggtgtctactgaccgtggtctctgcggcggcttgaacatcaacctgttcaaaaagctgctggcggagatgaaagcctggtccgaaaaaggcgtcgaaaccgatttggcgctgattggctctaaagcggcctctttctttggttccgtgggcggcaacgtggttgcccaggtgaccggcatgggggataaaccttccctgtcggatctgatcgggccggtgaaagtgatgttgcaggcctacgacgaaggtcgtttggacaagctgtacattgtcagcaacaaatttgttaatacgatgtcccaagagccgcaggtgcttcagctgctgccgttaccgccagccgatgacgaagagctgaagaaaacgccttgggattacctgtatgaacccgatccaaaagtgctgcttgataccttgctgcgccgctatgtggagtcgcaggtttatcagggcgtcgtggaaaacctggccagcgagcaggccgcacgaatggtcgcgatgaaagccgcaaccgataacggcggtagcctgatcaaagagctgcagttggtatacaacaaggcgcgtcaggccagcatcactcaggaactcaccgagatcgtttcgggagcctccgcggtttaagctaggtttacgaattacgtagaggattcaagatggctactggaaagattatccaggtaatcggcgccgtggtggacgtcgagttccctcaggatgccgtaccgaaagtgtacgacgcccttgaggtagaaaacggcaccgaaaaactggtgttggaagttcagcaacagctgggcggtggcgtggttcgctgtatcgcaatggggacctccgacggtctgcgtcgcggtctgaaagtgaacaacctgaaccacccgattgaagtgccggtgggtaaagctaccctgggccgtatcatgaacgtattgggtcaaccgatcgacatgaaaggcgacatcggcgaagaagagcgttgggcgattcaccgcgcggcgccaagctacgaagagctgtccaactcccaggaactgctggaaaccggtatcaaggtaatggacctgatttgtccattcgccaagggcggtaaagtcggtctgttcggcggtgcgggcgtaggtaaaaccgtaaacatgatggagctgatccgtaacatcgcgatcgagcactccggttattccgtgttcgcgggcgtgggcgagcgtactcgtgagggtaacgacttctaccacgaaatgacagactccaacgttctggacaaagtatctctggtttacggccagatgaacgagccaccaggtaaccgtctgcgcgttgcgctgaccggtctgaccatggcggagaaattccgtgacgaaggccgtgacgttctgctgttcgttgacaacatctaccgttacaccctggccggtaccgaagtgtccgcacttctgggccgtatgccatccgcggtaggttatcagccaacgctggcggaagagatgggcgttctgcaagaacgtatcacctcgaccaagaccggttccatcacttccgtacaggccgtttacgttcctgcggatgacttgactgacccgtctccagccaccacctttgcgcacttggacgcaaccgtggtactgagccgtaacatcgcttctctgggtatctacccggccgttgacccgctggattccaccagccgtcagctggatccgctggttgttggccaggagcactacgacgtagcgcgtggcgtgcagtccattctgcaacgttaccaggaactgaaagatatcatcgcgatcctgggtatggacgagctgtctgaagaagacaaactggtcgtatcccgtgcgcgtaagatccaacgcttcctgtctcagccgttcttcgtggcagaagtcttcaccggttctccgggcaagttcgtatcgctgaaagacaccatccgtggtttcaaaggcattatggacggcgactatgaccacctgccggagcaggcgttctacatggttggcaccattgaagaagcagtggaaaaagccaagaaactgtaacgccttgagaggagggtgatatggctatgacttaccatctggatgtagtcagcgcggaaaaacagatgttttccggcctggtgcagaagatccaggtgacaggcagcgaaggtgaactggggatcttccctggccatgcgccgctgctgactgccatcaagcctggcatggtgcgtattgttaagcagcacggtgaagaagagttcatctacctgtccggcggcatcctcgaggtgcagccgagcgtggttaccgtgctggcggacactgctatccgtggtactgacctcgacgaagcgagagcgttggaagctaagcgtaaagctgaagaacacattcgcagctctcatggcgatgtcgactatgctcaggcatccgctgaactggcgaaagcgatcgcaaaactgcgcgttatcgagctcaccagaaaagcgatgtaatgtttgggtgcccggcacccaactttaagaaagcggcctatagggtcgctttttttttactttaaaataagcatttcagcccggcgggcggtgtggtgtataaccgctgatatcgggaaataaacgtcgccgatcgccgacagttttttcgtcccgacgccgaattagccgtgatagcggcagaccaaggcccacgcggcctgcgccgggttcgtgcagagaaatatgtagtaatatcgtcgctaaacggttttactttcgtctatcaaaatggagttatcaggttgcttatgtcgaacagcgcaatgagcgtggtcatcctcgccgcgggcaagggaacacgcatgtattccgatcttcccaaggttttacatccgttggccggcaagccgatggtgcaacacgtcattgatgccgcgatgaaactgggcgcgcaacaggttcatctggtatacggccacggcggcgatctgttgaaaagcacgttgaccgaaggcgcgctgaactgggtgctgcaggccgagcaactgggtaccggccatgcgatgcagcaggccgcgccgcactttgccgacgatgaagacgtgctgatgctgtacggcgatgtgccgttaatctccgtggatacgctgcaacgcctgctggcggccaagccgcagggcggcatcggcctgctgacggtcaagctggacgatccgagcggttacggccgcatcgtgcgtgagcagggcaacgtggtgggcatcgtcgaacacaaggacgccagtgaggcacagcgccagatcaacgagatcaataccggcatcctggtggcgaacgggcgcgatctgaagcgctggctgggaatgttgaataacgacaacgcacagggcgagttttacatcaccgatatcattgcgttggcccatgccgacggcaagaaaatcgaagccgtgcacccgtcgcgtttaagtgaagtggaaggcgtgaacaaccgtctgcagctggcgactctggagcgcgtattccagtcggaacagtctgaaaagctgctgttggccggcgtgatgttgttggatccggcgcgtttcgatctgcgcggggaacttgttcacggccgtgacatcactattgatgcgaatgtgattatcgaaggtcacgtcaagctgggcgaccgggtgaaagtcggcgccggctgcgtgctgaaaaactgcgtgattggcgataactgcgagatcagcccttacagcgtgctggaagacagcgtgctggaagcagactgcacggtggggccgttcgcccgcctgcgcccaggcgcggagctggcggcaggggctcacgtcggcaacttcgtggaaatgaaaaaggcgcgtctgggcaaaggctccaaggccggccacctcagctacctgggcgatgccgaaatcggtgatgacgtgaatatcggcgccggcaccatcacctgtaactacgatggcgccaacaagcacaaaacgctgatcggcgatggcgtgttcgtcggttccgatactcagctggtggcgccggtgtcggtcggcaaaggatccaccatcgccgccggcaccacggtgacgcgcgatatcgccgagaacgaactggtgctgagccgcgtcaagcaggtgcacattcagggttggcaacgtccggtgaagaagaagccatagtgtgttttgcgttgggctccgttcagagcccaatacaaaacataataacccccaccatctacaggctcgggggacgcacggtaaaaaccggcaaaaatcaggtcaaggcatcgaaagcgcccatgaagggcgttcattaggaatataactgatgtgtggaattgtaggcgcagtagcgcaacgtgatatcgcagaaatcctgttggaaggtttacgtcgtctcgagtatcgcggttatgactccgctggtctggcggtggtcgatgaaaaaggcaacgtcagtcgcctgcgtcgcgttggcaaggtacaaaagctggccgaagcggcggaacaaaccgatctgcacggcggtaccggcatcgctcacacccgttgggctacgcacggtgaaccgaccgaagcgaacgcgcacccgcatgtttccgactacattaccgtggtgcataacggcatcatcgaaaaccacgagccgctgcgcgaactgctgattgaacgcggttaccgtttcagctctgaaaccgacaccgaagtgattgcgcacctggtgcactgggaacaactgcaaggcggtacgctgctggaagtggttcagcgcgtgatcccgcagctgcgcggcgcttatggcaccgtggtgatggacagccgcgatccgagcgtgctggtcgcggcgcgttccggcagcccgctggttatcggccgcggcgtcggggaaaacttcatcgcttccgatcagctggcgctgctgccggtcacccgtcgcttcatcttcctggaagagggcgacgtggtggaagtgactcgccgcaccgtcaacatcttcgacaaacagggcaacgccatcgagcgtcctgagatcgaatcccaggtgcagtatgacgccggcgacaagggcgcttatcgccactacatgcaaaaagagatttacgaacagccgctggcgctgaaaaacaccctggaagggcgtttcagtcatggccaaatcaacctgagtgagctggggccgcacgccgacgagttgctcgccaaggtgcagcacgtgcagattatcgcctgtgggacttcttaccactccggtatggtggcgcgttactggttcgaagcgctggccggcgtgccgtgcgatgtcgagatcgcgtccgaattccgttaccgcaaatcggcggtgcgtccgggcagcctgatcatcactctgtcgcagtccggcgaaaccgccgacaccctggcggcgctgcgcctgtccaaagagctgggttatctcggttcgctggccgtttgtaacgttgccggctcttcgctggtgcgcgaatccgatctggcgctgatgaccaaagcgggtacggaaatcggtgtagcctcgaccaaagccttcaccacgcagctcaccgtgctgttgatgctggtggcgcgcctgggccgtctgaaaggcatggcggaaagcgtggagcacgagatcgtgcatggtctgcaggcgctgccggcgcgtatcgagcagatgctgtcgatggataaagagatcgaagcgctggcggaaggcttctccgacaagcaccatgcgctgttcctcggccgcggcgatcagtatccgatcgccatggaaggggcgctgaagctgaaagagatctcctatattcacgctgaagcttatgcggcgggtgagttgaaacacggcccgctggcgctgatcgacgccgatatgccggtgatcgtggtggcgccaaacaacgaactgctggaaaagctgaagtccaacattgaagaagtgcgcgcgcgcggcggccagctgtacgtgttcgccgatcaggacgccggcttcgtcagcagcgaaggcatgaccctcattcctctgccgcacgtcgaggaaatcgtcgcgccgatcttctacaccgtgccgttgcagctgctgtcttaccacgtggcgctgatcaagggcaccgacgttgaccagccgcgcaacctggcgaagtctgtcaccgtagagtaatttgtcacaggtaaactgcaaaagccggccttagcgccggcttttttcatgagtgaccttaaagatgacagcgctgccgtttcggtgataaacgttgtcatattcaagcggataggccgcgccaagccggttttttattgcttgggaaatgtgctgtttcacggctaaccttctgatttacataaaaacaaatacctatcaaatacgctgtaatataactgtcatattgcgtacatttttctgtcaccaaactgtcctattttccctcctgcagcaatacttactctgattaaaacgactcgaagtcgattttaagtatcccattaggagggattatgaaactgatgcgtaccaccgtcgccagtattgtggcagcgaccttctccctgaccgccgtgtccgcgttcgctgctgccagcctgaccggtgcaggtgcgacattccccgctccggtttacgccaagtgggcagattcttatcagaaagaaaccggcaacaaagttaactatcagggcatcggctcctctggcggcgtgaagcaaatcgtggccaacaccgttgactttggtgcctccgacgccccgctgtctgacgacaagctggcggccgacggcctgttccagttcccgaccgtgattggcggcgtggtgctggcggtgaatatcccgggcatcaaatccggcgaactgacgctggacggcaaaaccctgggcgatatctacctgggcaacgtcaaaaagtggaacgatccggctatcaccaagctgaacccaggcgtgaaactgcctgaccagaacatcgccgtagtgcgccgcgccgacggttccggcacctcgttcgtgttcaccagctacctgtccaaggccaatgcgcagtggaaagaaaagattggcgccggttctaccgttaactggccgaccggtctgggcggtaaaggcaacgacggcatcgccgccttcgttcagcgcctgccaggctctatcggctacgtagaatacgcttacgccaagcagaacaacctggcttacaccaagctggtgtccgccgacggcaaaccggtcagcccgaccgaagagagcttcagcaacgccgccaaaggcgcggattggagcaaaactttcgctcaggatctgactgaccagaaaggcgacaacgtgtggccaatcacctccaccaccttcatcctggtgcacaaagagcagaaaaaccctgctcagggcgccgaagtgctgaagttcttcgactgggcgtataaaaccggtgcaaaacaagctaacgagctggattacgccaccctgccggcagaagtggttgagcaggtgcgtgcggcctggaaaaccaacgtaaaagacagttcaggtaaagcgctgtactaacaacgcaggggcgcgggttcgccgcgccccacacagttcttcaggctccgatcccggttggggctgccagggttcaaacagagagtaatctatggctgagtacaagccgaccatcaaagcaccgggcaaaaacggtgacatcattttcagcgcgctggtgagactggctgcgctgattaccctattgttgctgggtggcatcatcgtttcgctgatcttcgcctcctggccaagcatgcagaaattcggctttgcgttcctgtggaccaaagagtgggacgcgccggcggagcagttcggcgcgctggtgccgatctacggcaccgtggtcacctcgcttatcgcgctgatcatcgccgtgccggtgagcttcggcatcgcgctgttcctgaccgaactggcgccgaactggctgaagcggccgctgggcatcgccattgagctgctggcggccattccgagcatcgtctacggcatgtggggcctgttcgtgttcgccccgctgttcgccgaatacttccagacgccggtgggcgaagtactgtcgggcattccaatcgtcggcgagctgttctccggcccggccttcggcatcggcatcctggccgccggggtgatcctggcgatcatgatcattccttacattgctgcggtgatgcgcgacgtgttcgaacagaccccggtaatgatgaaagagtcggcctacggtatcggctgcaccacctgggaggtcatctggcgcatcgtgctgccgttcaccaaaaacggcgtcatcggcggcgtgatgttgggcctgggccgcgcgctgggggaaaccatggcggtgacctttatcatcggcaacacctaccagctcgacagcgcttcgctgtacatgccgggcaacagcatcacctcggcgctggccaacgaattcgctgaagccgagtccggcgtgcacaccgccgcgttgatggagctgggcctgattctgtttgttatcacctttatcgtgctggcgctgtcgaaactgatgatcatgcgtctggccaagaatgaggggcgttaacatggcgacgatggatatgcaaaacgcagtcgttctggcggaaagccgccgcaaaatgcaggcctggcgccggcagaaaaaccgcctcgcgctgttcctgtcgatggcgaccatggcgttcgggctgttctggctgatctggatcctgatcgccaccgtcaccaaaggcttcgacggcatgtcgctggcgctgttcaccgagatgaccccgccgccgaataccgcgggcggcggcctggccaacgccatcgccggcagcggtctgctgatcctgtgggcgaccctcttcggtacgccgctgggcatcatggccggcatctacctggcggaatacggccgtaaatcctggctggcggaagtgatccgctttatcaacgacattctgctctccgcaccgtcgatcgtggtgggcctgttcgtttacaccatcgtggtggcgaagatggaacacttctccggttgggccggcatcgtggcgctggcgctgctgcaggtgccgatcgtcattcgcaccaccgagaacatgctgaagctggtgccggatacgctgcgcgaggccgcttatgcgctgggcacgccgaaatggcgcatgatttccgctatcacgctgaaggcgtcggtgtccggcatcatcaccggcgtgctgctggcgattgcgcgtatcgcgggggaaacggcgccgctgctgttcacctcgctgtcgaaccagttctggagcaccgacctgatgcagccgatcgccaacctgccggtgaccatcttcaaattcgccatgagcccgttcgccgaatggcagcagctggcctgggccggggtgctgttgatcaccctgtgcgtactgttactgaatatcctggcgcgcgtaattttcgccaagaaaaagcattcataaaattttgagcgccgctttggcggcgctgatgaaaagagagaagtcttgatgagtatggttactgacgcttccagcagcaaaattcaggtacgcgatctgaacttctactacggcaaattccatgcgctgaagaacatcacgctggatatcgccaagaacaaggtcaccgcgtttatcggcccctccggctgcggcaaatccaccctgctgcgcaccttcaacaagatgtaccagctgtacccggaacagcgtgcggaaggcggcatcctgctggacggccagaacatcctgaccgacaactcggatatcgcgctgctgcgcgccaaggtcggcatggtgttccaaaagccgacgccgttcccgatgtcgatttacgacaacatcgccttcggcgttcgcctgtttgaaaagctgtcgcgcgccgatatggacgagcgcgtgcagtgggcgctgaccaaggcggcgctgtggaacgaaaccaaggacaagctgcaccagagcggctacagcctctccggcggccagcagcagcgtctgtgcatcgcccgcggcatcgccattcgtccggaagtgctgttgctggatgagccttgctcggcgctggatccgatctccaccggcaagattgaagagctgatcagcgaactgaaggccgattacaccgtggtgattgtgacgcacaacatgcagcaggcggcgcgctgctccgactctaccgcatttatgtatctgggcgagctgatcgagttcagtgatactgataacctgttcactgcgccgcagaaaaagcagactgaagactacatcactggccgttatggttgataggaagcatcatggataacctgaatttaaacaaacacatttccggccagttcaacgcagagctcgagcatatccgcacccaggtgctgaccatgggcgggctggtggagcagcagctgaccgatgccatcaccgcgatgcacaatcaggatggcgagctggccaagcgcgtgatcgaaggcgacgccaaggtcaacatgatggaagtggcgatcgacgaagcctgcgtgcgcattatcgccaagcgccagccgaccgccagcgatctgcgtctggtgatggcgatcatcaaaaccatttccgaactggaacgcatcggcgacgtggcggacaagatctgccgcaccgcgctggagaagttctcgcaccagcaccagccgctgctggtcagcctggagtcgctggggcgccacaccgtgcagatgctgcacgacgtgctggacgcgttcgcgcgcatggatctggacgaagcgatccgtatttatcgtgaagataaaaaggtcgaccaggaatacgaaggcatcgtgcgtcagctgatgacctacatgatggaagattcgcgcaccattccgagcgtgctgaccgcgctgttctgcgcccgttctatcgagcgtatcggcgatcgctgccagaacatctgcgaatttatcttctatttcgtcaaaggacaggatttccgtcatttgggcggcgacgccctggaaaagctgctgtctccgggcggtaaagacgaaaaagacgactaaccctttccgggtaatatccttccaaggcgcggtttcccgcgcctttattccatcttaagtgcgtaaagataaaaaggttataaatatagctttttatattatttcctgacctatgtggcgcttgctagcttatccgccagcaggacatcaaccacttaggagctttctatgaaacatcgcgctttggccttaacgttgttagccagtctgaccggtttcgccgccggcgccgcgcacgcggacaaacttgacgatatcaagcaagccggcgtggtgcgcatcgcggtgttcgacagcaatccgccgttcggttacatcgatccgcagagcaagaagctggtgggctacgatgtggatgtcgccgacgcgatcggcaaagcgctgggggtgaaagtggagctgcgcgccaccaacccggccaaccgcattccgctgctggtgtcgaagaaggttgacctgattgccgccaacttcaccattaccgacgagcgcgccaaggaagtgaacttcagcgtgccgtatttcgccaccggccagaaattcatcgcccgcaaaggcgtattgaaaaccccggaagacatcaagaagctgcgcatcggcgcggacaagggcacggtgcaggaaatcaccctgcgcgagcgtttcccgacggcgaaagtgatctcctacgatgataccccgctggcgttcgtggcgctgcgtaacggcaacgtgcaggcgatcactcaggacgacgccaagctggtcggcctgctcggcaacctgccggcggcgcaaaaggcggagtttgaaatttcgccgttcagcctgaccaaagagtatcagggcgtcggcattcccaagggcgaagatcggctgaccgccgcggtgaacgagacgctgatcaagctggaaaaagacggtgaagcggttaagatttacgatcgctggttcgggccggaaacccaatccgcccagccgcgcggcgatttcaaaatcgcgcctttggatcagcaaccgaaagcctgatttaaccgcgcgcggtgagatcggtacggaggggcgcagcttgctgcgcccctgatgcattctgcaagacaaggattgaacatgaatctggactggctgctggcgccgcaatacctgagctggctgtggcacggctttctgctgacgctgtggctttccgcctgcgcgggcctggcggccacgctgctgggcttcgtgctggcggcgatgcgcgacagcagcctgcggccattgcgctggctggcgatgggctacagctcgctgtttcgcaatacgccgctgctggtgcagctgttcttctggtacttcgccgccgggcagatcttgccgtccgccgccatgcagtggctgaacagcgcccatcagatcggcccgcttgagtggccgtcgttcgagtttctcgccggtttcttcggcctgacgctctactccaccgcctttatcgccgaagagatccgttccggcattcgcggcgtcgccggcgggcagaaatatgccgctcaggcgctggggctgaccggctggcaggcgatgcgctacgtggtgttgccgcaggcgctgaaaatcgcgctgccgccgctgctggggcaatacatgaacgtgatcaagaactcgtcgctgaccatggcgatcggcgtggccgaactctcttacgcctcgcgtcaggtcgaaaccgaaaccctgcgcaccttccaggcgttcggcgtggcgacggtactgtacatcgccatcatcgcgctgctggaaggctggggcatgtggcgacaacagcgtaaaccgctgggagggcattgagatggatttcagcgtgattcacgacaacctgggctacctgctgtggggcacctggccggatgggccgctgggcggcgcggcgctgacgttggcgatcagtctgatggccggggtcgcctcggcggtgctcggcaccctgctcggcgtggcgctggcgatgtcgcgcggcatcgccgccgggctgctggcggcggtgttgggctttttccgcgccattccggtcatcatgctgatcttctggacctatttcctgctgccgatggtgtttggcgtagagatcccggaaatcaccaccgtcgtgtgcgcgctggcgctgatcgcctcggcctatctggcccatgcggtgaaagccggcatcgccgcgatcggccccggccagtggcaggccgggctctctctggggctgacccgctggcagacgctgcgcatgatcgtgctgccgcaggcgctgcgcatgatggtgccgtcgttcatcaaccagtggatctccctgatcaaagacacctcgttggcttatatcgtcggcgttggcgaactgaccttcctggcgacccaggtcaacaatcgcagcatggtctacccgatggaagtgttcctgttcgtggcgctggtttatttcgtgttttgcctggcgctcgatctgctggccaatgcggtcaaccgccgcttcggcgcgcaaacccgcgcgctgaaacggtcctggcgctggtggcgcaacaagccgccgttgccggccagttaatcggccgtcagccgccagccgcgttcgcgccacagcgtgggcaattgagccaggtcgtcaaacgttgtcaccagcgggtgatcgatcggcgggttatgcggatcggcgcagaagtaaaagaccgggataccggcattgatgccggcctgcgcgccggcgggcgagtcgtccaccaggatgcagcgcgtcaccggcacccgcatctgttcagcggcgtgaaacacgatcgccggatccggcttccagcgctgaatgtcatagccgctgaacaaccggtcatcaaaataaggcagcatgccggtcaggccgagcgagtgctgcatcttgctgaccggcccgttggagacggtgcagacgggcaccgtcacctgcgccagcagctcgcgggcgccggcaatctgctgcagctcgctgtcgaacaaccgcgccacttcctgccgatacagcggctccagcgtctcttttgccaggtcagtgccctgctcggcgttgacccgatcgatgatctcgtacagcttcacccctttgtatttcttgaacacctcttccagcgacagatgaatgccgtagcgggcgaacatgtgcacataggctttgctgcacagcacttcgctgtccaccagcgtgccgtcgcagtcgaacaaaatgcagtcaatctgattcatgcgggacaggttccttcgggttaacgccgctgaggcgactcagcgatcacttgatcaggttacgcgccttgagatcgtgcaaaatcagcgcggcgacgtgtgagcactgcggcagatcgcggctgtcgcaccacttcagctcggcgatttcggcggccggctgcaactgcccggtaaagccggcctggtagcagcgaatgcgcacctgggtgccgtcctgcttgccgtctgccgggccggagaactcgccgtaaaacgcgatggagttcggctgcagcgcgacggtcagctcttcgtcgatttcgcggcacagcgcctgttcgtcggtttcacccgcttcgcgctttccgcctggcatataaaacagcgtcttgttgtgtgagcgcaccagcgccactttgtcatctttcagcgcgatcaacgccagcttatcgataaaggtcgaagacatgcggattcctgtttgttaacggatagggaaagagggggcgataggccattttatcggccgtgccgacaaacggcaacgcagcgggcggtcgggggatgaatgtctgtaaatacaagccgttgacgcatttagccgtaaagacggcgaaaaaaacctgtgaccggcgtcaaaagccccactttttgttataggatagccggcgactgtccattcccattttcggaattctgataatgaccaaaccagtatctggccttgacgctgagcaaggcttgcttgggcgcgtgtttaaactcaagcaacatggcacgacggcgcgtacggaaacgattgccggtatcaccaccttcctcaccatggtgtatatcgtgttcgttaacccgcaaattttaggcgcggcgggcatggatacccaggcggtatttgtcaccacctgtttgatcgccgccttcggcagcatctttatgggcctgctggcgaacctgccggtggcgttggcgccggcgatggggctgaacgctttcttcgccttcgtggtggtcggggcgatgggcatctcctggcaggtgggcatgggcgccatcttctggggcgcggtcggcctgctgctgctgaccattttccgcattcgctactggatgatcgccaacattccggtcagcctgcgggtcggcatcaccagcggcatcggcctgttcatcggcatgatggggctgaaaaacgccggcatcgtggtggccaacccggacaccctggtgaccatcggcagcctgacctcgcacaacgtgctgctgggggcgctcggcttcttcattatcgccgtgctctcttcgcgtaacttccacgcggcggtgctggtgtcgatcgtggtcactaccctgatcggctggatgctgggcgacgtgaaatacggcggtctgttctcgctgccgccgagcattacctcggtggtgggccaggtcgacgtggccggcgcgctgaacatcgggctggccggggtcatcttctcgtttatgctggtgaacctgttcgactcctccggcaccctgatcggcgtcaccgataaagccggcctgaccgacaaccagggtaagttcccacgcatgaagcaggcgctgtacgttgacagcatcagctcggtggccggttcgctggcgggcacctcttccgtgaccgcttatatcgaaagctcatccggcgtcgccgtcggcggccgcaccggtttgacggcggtggtcaccggcctgctgttcctgctggtgatcttcctgtcgccgctggcgggcatggtgccggcgtatgccgccgccggcgcgctgatctacgtcggcgtgctgatgacctccagcctggcgcgggtgaaatgggacgatctgaccgaagcggtgccggcgtttgtcaccgcggtgatgatgccgttcagcttctcgatcaccgaaggcatcgcgctcggctttatctcctactgcgtgatgaagctgggcaccggccgctggcgtgaaatcagcccgtgcgtggtggtggtggcgctgctgttcgtgcttaagatcgtcttcgtcgacggccattgacagccaaagggccgacggcggtcggccctgaatccctagacgcccggcgtcgcatccggcgcctgatccaacacccactgcaacggccgtctgaagcgcgcctgccagctgccggcggcatcctctccctgggcgaagtgcagcgtctgcacctgattatcctccccgaacagattggcgaagtgcaacgccagcgcctgctcgctgaaggtctgccgatcgtaatacgccatcacgattttctttttcgccgccagcgactgctgggccggcttgatctcgccgtggggggcgatcaggagcgcgccggcgtaaaactgtgggtacttcgcgagcaggttagcggcatgcagcgcgccctggccgcgggcgctgagataaatccgccggggatccagctttagctgcggagccagctgttgcaccgtgcgctgcagggcggtttgggtgctctcgtcgctgtaatttgaccagcggaagctgttttccgacagcatctgcgtgccgttgatctcgatgtaggccacgcccatttcgccgaacagcagccgctcctcggggctgatggcggcggctttgccgtaggtatgcaggaagatcaccgttggccagcctgcgggcggcgcttcgccgtccggcaccgcgtagctggctttgccttcatactgacgggcgtgctgcagatagcgcgctttggtgacggccaaaatggattggtaagtggcggagtgttggatgctgttgaaggcgtcgtcctccagcaggttgtagtagtaccacaggccgcggtcggcgctcagctgcaggtaacgctccgccagttcggtttgccctttctccgccgacgacaccgccagctggtagggcgcccagacgttgcggccgtcttcgcgcatcagcgtcaggtacagcgacatggcgccgagctttttgtcttcctgggtttgcgcggaacgcgacagttgggcgttgagcgcgctgtgcgccggcagctccagcggctcttcaccggcgggataacgcatgtctgcggcgaaagcgggactggtgatggaaacgaaaaataacgctaaaatgaaaaaatacatgatgctatggctttaatttcaataaattgacggacgtcatgtcctgttgcggcgcccagcgggcgccgcgagaccttcactccacgcggcgaataaaatcgctgaacgcggacagctggccggtcaggaaatccagcgttccctgatcgctcagttcaccggcctgttcatcgaccttgctctggatcacgccgcccataaactcaggcttgttcattaccatcgcatcgaggaacaccaggatctggcgcagatggtattggcagcgcgcgccgccgatcggccccattgagctggtttgaatggcgaccggcttgccggccagcggctgattcggtacgcgagacagccagtcgatggcgttcttcaacccgcctggtacggaatagttatattcaggggtgacgatgatcacgccgtcggcctggcggatctgctcggcgatcgcctcgaccgcggcagggaagccttcaccctgttgcatgtcggcgtcgtacagcgggatatcgcggatggagggcagcgcttcaatggtgacgccctgcggggccaggccaggcagggcgcgggccaccatggcgttgtaggagcctttgcgcaggctgccgagtagagtgacgatttttaaggcttggtctgacatggtgattctccctttcgaatgagcagattcagcgtacaacatgggcgaatagtaggctaaagcgcgggtcgagaataggcgattgctcaacatttagctgtctttacaatttaatccagtaactcgtgcggtaaagaccgcgttatccgctttgcgccgcgtcaacctggcgtctttaggcccgtcagtttaacgaagcgtgaggatgccgccgggctgcgcggcgagatttccccgtctttgtgcaggccgccgcgctcttcgtagcgccagcacagcaggcgatccagcccggggctgccggcgcaggcccagctcagatattcgtcggcgtcgctcatcacctgaacgtccggcgtggcgctggagcgcaggtggccggagaagggatgcagacgcagcgtagactggccgctgttgccgaggccggaaattttcagcacgctttgccgaatgctccacagctgagtttccgcctccagccgatcgtcctgcgcgccgatccaggcgctttccgccggcgtctggtgcgcgttctgcagcgcgctttgccggctgccgcgcgcccgcatcacttcgatatccagtccgactttgccttcgtcgctgagcagcacgcccacggtgttgctggcataggcgaggctaaaatcgggcagctgatgatcggcgaagcaggggcggccggtgggcgtggtggctatagggggaagcgtcggcaggccgtacaggtagaacatcatttcggcgagcagaatgcgcccttgcaggtagcgcgtgcggcgcttaacggaaaaggtgcgggtggcggctatcacttcgtcggcgagtctctgggtatccaggacagcggaggccggggtccatcgggcaaaatgacacgccattgttcactccatgacagagagtcgctaagaacgcaggggtgttagattaagactaagttgaggatttatcatcaaaaaacactatgcgttttatccgatttgttggctttgcgctgtataggcggggggagaagatcgtacggacctgaataggtgcgtgcacaaaattaatcagttccgaaaccaaccacatccgaatcgacggcgtccaatgagcctataaaagtagctatcagacaagaaagagttggcggagagagcaggattcgaacctacgacacgataactcgtgtggatttaagaaacggttagtttcttaaatctggcttaaaccactcgcccacctctccgcattcgtttgttggaaacataaaaccacaaaataaaaatggttaaaataacctaaacttggaaatgtgactaaagccacaaaagccctattttatatgtgtgtttgttaattatcggagtcagatcactaaatttacattagctattgttataaaaagttggcgtcattggctacgaatagggaagaagggcatgccagatctcgagttaatgccgctgcaaagcgccgaattttataagacagctgaacgtgttgtttttaaagaatataaatgcaactgcaaaaaaggttggaagggcgaagatcgctttatcgtctacaaggccgatcagaatggaatcattgaggtcgtcaacaatgaggtttcaaataataacctcgaagagctcatcgcgctggcatcgtcttttttgacggataaggtggtgatttccggcgggcataccgtggttaatttggacgatcgtttttctgtcagcagtgaagtggaaaagtccgcgcgattctgcattgactacatagccgaatccatccgacagctcaacgttcagcctgacttcttgatggaaataaatgatttctatatggaaaaaaacgatggcagcgagatagacggcgctaacgaattcaggaggatggcgacatctccgtatattattccagaaaaaataaacgactacattctggcgtcgaatcaacgtcataacattgatatcaatgcattttatgtcagtgagaaaaacatggcggatcgctttaaacgccacattaaaaaccgtatggataaagaggcgtattttcagcgccaagacggtaatgtgaagatggcggtgggagagcacgagttcgatatcatcaaggaaaataaaccgacctgtgcggcgggcaatgccgcgacgttcagggctattcggtatcgtatttcctctaataaagtcttcgataattacacgtcgcatattggcgtttttccgctgtgttcacgcgttaacgtacttaacggctatcgcgcggccgcgactttttacgataacttttccttgccttccttactggttttcttcggaagatcatgttttgaatgacattttttgtgccagctggctatgtgtcgctgcatagccatgatggtcgagcattatcatgaaaatttcacacctgtattggccagtcactttcttctccacggcattcggcgccgggattttctttttgcctcaggcggtggggccgggcgtgctggggatgaaggcgttcatgctgtttatcgtcatcgccatgtcggtatcgatgatggcgcactatctttttttcaaattcatcatctcgcacccgcagaaagatttcctggcggcatcgtcgacgtttatcggtgagcgggcggcggcaatcgtctgtgtgctgtttattctgtcgatgatcattatcgtgctgataaatttcatcaccctggttaacgtggtcgcgtcttttctccacgatggattttgggttcggggcggtgtttcgctgttgctgagtgcggcgctgtcggccgcatggctggcatttagccagcgaatcgagcacttgatctccagaatggcactggtttctatcgttctggtggcgatccttacgctgtttttcctgttacaacctgcaggggctcagcggacgcctgcgccgccgagcatttcattgcaaacgttggtgctgctgcctatttttctttttacgtttaactttaccccgtgtatccagcggtttgcgcaaagtgccgtgcggccgcaggcgcgcagtattctgttcggcaagatactgatcctggcgtttatcgccatgatcgttatcgctatcagtcgcttgctgacgttggatgatatctcgatcattaacggccgcaatgtggattcgctgttttataccgcaggtttgaccggtaactcgatggcgtggttaggcgcagccctgctgctgtgcttgctcaccggcggcgcttatatcggcaccttgaccggggtcatcgacggtattacgtccttcggcatggcgggaaaaaagggcatcatcgcggggaacattgttgtctgtacgcttatcggcacgattaatccgagcatcatcaagatcatctcaagctggtcgatacccgttatcgtgatgaccgtctttttcatcccatcactgtattttttacagcggggcgacggccagcaaaagatggtaggaatagcggtgctgtgctgcggcatcgcggtgatagcgacgctattcgtgtaaagcggtacgtctaagccagaatcagcgtatcgccggtggccggcgcgatcccttccggcagccatagccggccccacgcgccggtacagtggcaacccatgatcttttccggctggtgctgccgtaaaaaacggcggacgcgccagagcgtccgcggggaagcgcaacgcagatgaaaaccgccaatcaaggcgtggatccgatcgataccggtgattttctggcagtggcgcacgatattcacgatcccgcgatgcccgcagccggtcacgatcaccagaccgcgatccgatttgtaaatcagcaccccttcgtcgataacgtaatccaccgccgcgttttccccggtaatcaccccgtaggcgcgcggtgcgggcacggcgatttcacctgaccacataaagcgatcgccgatcgccagcggttcgcgactgtagtgcatgttatggcgcgagtagtcgatgtccaaagagagctttttgattttgtgggtgtggcccagcaccttcagcgccgcatagcgctcatcgccgacctgcgggtggcagatgatgcggctgttgtccggcagccaggcgacgccgccgcagtggtcatagtggccgtgggagagcaccgccgcggtgatgcgggagagatcgacgcccatcagcgccgcattgtgcaggaagctgtcgtcggggccggtgtcgaacagtatggaggtcgtctcgtcttcaatcagcaggcttaacccggccttggcctgcaatagcgggttggcgccggcggcgcggcggttttccagcaataccttgagggttaacgccatgttgactcgttcctgagaaagacacctgaccgtccagtatatcgcgggcagttgcggcggcgctgtgagccagcgcgcagagcgagagcgggaaagaaaaacggccggaacaagggcttatcccggccgtgaaggcctctggcagcgcgttatttcccgatacagaagctggagaagatgcggcccagcaggtcgtcggaggtgaattcgccggtgatttcgctcagggccagctgcgcctgacgcagttcctcggccagcagctcgcccgcgtaagcgctcactaactgttctttgccctgcaccagatgctgcgccgccagttccagcgcctgcaggtggcgacggcgcgccaggaagccgccttccatgttgctggtgaagcccatgctctgtttcagatgatcgcgcagcacatcgacgccttcgccggtgcgggccgacaggcgaataagtgagtggttattcacttccgtcaggcccagcgtttcaccggtgatgtcggccttgttgcgcaccacggtgatcggcagcgtgcctggcaggcgcgccataaactccggccagatctccgccggctcggtggcggcggtggtggtgccgtccaccataaacagcaccctgtcagcttgttcgatctcgttccaggcacgttcgatgccgatacgctccacttcgtcgctggcgtcgcgcaggccggcggtgtcgatgatgtgcagcggcatgccgtcgatatggatatgttcgcgcaagacgtcgcgggtggtgccggcgatatcggtgacgatcgccgcctcgcgcccggccaacgcattgagcaggctggatttaccggcgttaggacgcccggcgatcaccaccttcatcccttcgcgcagcaggctgccctggcgcgcttcaccgcgcacgttgtccagatccgccatgacgtcgttgagctgcgcctcgattttaccgtcggacaggaagtcgatttcctcgtccgggaagtcgatcgccgcttccacgtagattcgcaggtgagtgagcgcttccacgagctggtggatgcgggtggaaaatgcgccctgcagcgagttcatcgccgaacgcgccgcctgctcggagctggcgtcgatcagatcggcgatcgcttcggcctgcgccagatcgagtttgtcgttgagaaacgcgcgctcggagaactcgccgggccgcgcaatgcgcacgtcgggcagcgccagcacgcgcttgagcagcagatcgaggatcaccggcccgccgtggccctgcagctccagcacgtcttcgccggtaaaggaatttggccccggaaaccacagcgcgatgccctgatcgagggtggcaccggcggcgtcgcggaacggcagatagtcagcgtagcgcggcttcggcagcttgccgagcaacgcctgggcgacgtctttggccttgcttccggaaatgcgcagaatgccgacgccgccgcgtcccggcggggtggcttgggctacgatggtatcggtggtgctcataacggttctctctgacgattaagatgcaaaaaggcggtctaatgaccgcctttggtgtgactgcaagggtcggcgcgccgaacccctacactacgcttagctttttttcttgtcgcggctgtgcagaccgcgtttttccagaccacggtaaatcagctgctgctgcaggatggtcaccaggttgctgacgatgtagtacagcaccagaccggacgggaaccacaggaagaacactgtgaagatcaccggcatgaaggtcatgattttctgctgcatcgggtcagtcacggtggtcggcgacatcttctgaatgaagaacatcgtcacgcccatcaggattggcaggatgtagtacgggtcttgcgccgacaggtcatggatccacagggcgaacggcgcgtggcgcagctcgaccgaacccatcagcatgtagtacagcgccaggaagatcggcatctgaatgatcagcggcagacagccgccgagcgggttcactttctccgccttgtacagcgccatcatctcttggctcatgcgctgtttgtcatcgccgatgcgctcgcgcatcgcctgcaacttcggctgcagcatgcgcattttcgccatcgaggtgtactgcgccttggtcagcgggtacatgatgccgcgcacgatgaaggtgatgatgatgatggagaagccccagttaccgataaagccgtggatgaacttcagcagtttgaacagcggctgggagatgaaccagagccaaccgtaatccacggtcagatccaggtgtggcgccagctgagccatctggtcctgcagctccgggccgacccacagggtcgcgttcagctgttgctgagcgcccggctgcaccacgaccggtgtagatttgaagccgatggtggacaggttgtcacccggtttggcggtgtagaaggtgttgtcacccttggtcgccggcacccacgcggtggcgaagtactgctgcagcatcgcaacccaaccgtctttggtggtgacgctcaggttttcgtctttgtcgaacgcgtatttctggtacttgtcctcgctggacgagtacgccgcgccgcggaaggtgtgcagcgcgaagttgctgctgccggtgtcacggtgcttaggcaattcggtggtctgcttcagctggccgaacagggtcagctccagcggcgtcgcgcctttgttgtcgatgctgtaatccacgccgaccgcatagtggttgcgtttgagcacgaaggtcttggtgtagatcgcgccgtctttaccggtgtaggtcagcgggatgcgcagctcgtcctggccttccggcagggtgtagctgtcttgcgccgcctgatacagcgggcgttcgccgttggccgggttgtccgggccgtttttaccggtcaggccgctttgcgcctgatagacgaacgacggggtggtttccagcagttggaacggagtcgatgaacccagagtttccgggtaggccaacagtttagcctgctcgatatcgccaccacgggtgttgatggtcagtgacagcacgtcggtgttcacggtaatcagcttaccctgaccactggctggcacggcctggctggcggcatcaccggctactgcgttcgaagtctgttgcgtggtctgtgcggccggctgcggagcgttgtccgtttgccatgcctgccagatcatgaaagacacgaacagcagagcgatgagaagaagattgcgttgcgaatccatcgttagtgttctctgttatcgtcggtttttggcggcaccggatcatcgccacctgggttcaaagggtggcattttaatacgcgtttcaatgctaaccaactgccttttatcatgccaaacctgcttaatgcctcaattgcgtaatgagagcatgtcggctggaagcgacaacgaggccctagcagcgggctgatgacgagctgataggcccgcaccagcccgatcaggatgcgggagcctggcgacagtggcgacgccataatttatccaaagcttccgtcagcgcgcggttatccaaatccgctatcccctttttggccaccacgacaaaatccatcgccggtaattcgtgctggcgcaggcggaagctttcgcgggttaggcgtttgatccgattacgctcgtgcgcgcgtttgacgtgttttttggcgacggtaagaccgatgcggggatgccccagctggttcaggcggccgaggatggtgatttgcggcgtgccagcccgttgtggctgctggaagacgaaagtgaaatgagtgggagttaacaaacgtaactccctgggaaaagcgagcttaaccactcagcgggttagctttattacttagaaacagtcagacgagcacggcctttcgcacgacggcgggccagaacttgacgaccatttttggtggccatacgagcacggaaaccgtggctacggttgcgcttcaatacggacggttggaaagtgcgtttcatagcgatttctacctaaacttaaaataattactgatcagtaaacgcgtttggctactcggcgtgaagatgaccgacgcctcaatcgcaatacataaagaagcgggattgtaataattgtacagtcctgagtcaattcgcatcgcgccagcctacctggttgtctgccagtaacggaacaaaatccgctcttggcccgtggtcaccgcagaatcctgtctggctaatgacgcaccataaggaaccaggtatcacacgtagggcgaagattatacggactcggggtgaaatcgcaaggatccccgtgagatcctttgcgcgcgatcgcaggatccgacgtggataacagggtataaccggttgacaatgtaaaaaatgcggcgcagcggccgggatctgcgcggtcattcggcgccggcggcgaaaagatcgccgccggccgcggcctgtggataaaatggatctaatctgtgaggaaggggaggatctcttgcgcggattgcgctatgatccgtcattccgatcgcgatccctcatgccgggatcgtgagggacacaaaccgtgaaaggcggttcgcatcccccacaggcaaacagccgatgccgggtatgtgtcaaaaatcatgagttataaaaaagttgcccgtttcttttctttattgatcttgttcgagtggagtccgccgtgtcactttcgctttggcagcagtgtcttgcccgattgcaggatgagttacctgccacagaatttagtatgtggattcgcccattgcaggcggaactgagtgacaacaccctggcgctgtacgcgcctaaccgttttgtgctggattgggttcgcgataagtacttaaacaacatcaatggtctgctgaatgatttctgcggcacggacgcgcctttgctgcgttttgaagtcggcagcaagccgatcacgcaggtgatcagccagaccgtgaccgccagcgtcagcagcgcccctgcggctccggcggcgcgcacggccgcgccttcgcgcccgagctgggacaacgcggcggcgcagcccgagctctcttaccgctccaacgtcaaccctaaacacacctttgacaacttcgtcgagggtaagtccaaccagctggcgcgcgcggcggctcgccaggtggcggacaatccgggcggcgcctacaaccctttattcctgtatggcggcaccggcctgggtaaaactcacctgctgcacgcggtcggcaacggcatcatggcgcgcaaggccaacgccaaagtggtctacatgcactcggaacgctttgtgcaggacatggtcaaagcgttgcagaacaatgccatcgaagagtttaagcgctactaccgttcggtcgacgcgctgctgatcgatgacatccaattcttcgccaacaaggagcgttcgcaggaagagttcttccatacctttaacgccctgttggaaggcaatcagcagatcatcctgacttcggatcgctaccctaaagagatcaacggggtggaagatcgtctgaagtcccgcttcggctgggggctgacggtggcgatcgagccgccggagctggaaacccgcgtggcgatcctgatgaaaaaggccgacgaaaacgacattcgcctgccgggcgaagtggcgttcttcatcgccaagcgcctgcgttccaacgtgcgtgagctcgaaggggcgctgaaccgcgtgatcgccaacgccaactttaccggccgggccatcaccatcgatttcgtgcgcgaagcgctgcgcgatctgctggcgctgcaggaaaagctggtcaccatcgacaatatccaaaagacggtggcggagtattacaagattaaagtcgcggatttgctgtccaagcggcgttcgcgatccgttgcccgcccgcgccagatggcgatggcgctggcgaaggaactcaccaaccacagcctgccggaaatcggcgatgcgtttggtggccgcgaccataccacggtgttgcacgcctgccggaagatcgagcagttgcgtgaggaaagtcacgacatcaaagaagatttctccaatttaatcagaacattatcttcatagcgctatgaaatttatcgttgaacgtgagcatctgctaaaaccgctgcaacaggtgagcagcccgctgggcggccgcccgaccttgccgatcctgggcaacctgctgctgcaggtgacggaaggctccctgctgctgaccggcaccgatctggagatggagatggtggcgcgcgtcgccctgtcccagccgcacgagccgggcgcgacgactgtgcccgcgcgcaaattctttgatatttgccgtggcctgcctgaaggggcggagattgccgtcacgctggagagcgagcgcatgctggtgcggtccggccgcagccgcttctcgctgtccacgctgcccgcggcggacttcccgaacctggacgactggcagagcgaggtggagttcaccttgccgcaggcgacgctgaagcgcctgatcgaagccacccagttctcgatggcccatcaggacgtgcgttactacctgaacggcatgttgtttgaaaccgaaggcgaagagctgcgcaccgtcgcgaccgacggccaccgcctggcggtgtgctcgatgccgataggccagcagctgccatcgcattcggtgatcgtgccgcgtaaaggggtgatggaactggtgcgtctgctggacggcggcgactcgctgctgcagctgcagatcggcagcaacaacatccgcgcccacgttggcgatttcatcttcacgtccaagctggttgacggccgtttcccggactatcgccgcgtcttgccgaagaatccggacaaaacgctggaagccggctgcgatctgctcaagcaggcgtttgcccgcgctgccattctctcgaacgagaaattccgcggcgtgcggctgtacgtcagccagaaccagctgaagatcaccgccaacaacccggagcaggaagaggcggaagagatcctcgacgtcagctacgacggcgcggagatggagatcggcttcaacgtcagctacgtgctggacgtgttgaacgcgctcaagtgtgaagacgtgcgcctgctgttgaccgactcggtctccagcgtgcagatcgaagacggcgccagccaggcggcggcctacgttgtcatgccaatgcggttgtagtctcgttaccttgaattacagcaccgtcatcggtaaagagattgcatggctctgacgcgtttattgattaaagatttccgcaatatcgaggcggcggatttggcgctggcgccgggattcaacttcctggtcggcgccaacggcagcggcaagactagcgtgctggaggcggtgtatacgctcggccatggccgcgccttccgcagcctgcaggccggtcgggtgatccgccacgaccaaccggagttcgtgctgcacggccgcatcgaaggcgcggagcgcgagctgtcggtaggattgagcaagagccgtcagggtgacagcaaagtacgcatcgatggcagcgacggccacaaggtggccgagctggcgcagctgctgcccatgcagctgatcacccccgaaggttttaccctgctgaacggcgggccgaaattccggcgcgctttcctggactggggctgttttcataacgaacccggttttttcaccgcctggagcaacctgaaacggttactgaagcagcgcaatgccgcgctgcgccaggtgagtcgctatgcgcagatccgcgcctgggatcaggaactgatcccgctcgcggagcgcatcagcgaatggcgggcggaatacagcgacgcgatcgccgcggatatcaccgcgacctgcgcgcagtttctgcctgaattcgccctgagcttctccttccagcgcggctgggacaaagagagcgactacggcgagctgctggagcgccagtttgagcgcgacagggcgttgacctataccgcggtggggccgcataaagcggactttcgcattcgtgccgacggcacgccggtagaggatttgttatcgcgcggtcagcttaagctgttgatgtgcgcgttgcgcttggcgcagggtgagtttctcacccggcagagcgggcggcgttgcctgtatctgattgatgattttgcctccgagctggacaccggccgtcgccggttgctggccgatcgcctgaaagccacccaggcccaggtttttgtcagcgcggtcagcgctgaacaagtgaccgacatggccggtgaaaagggcaagatgttccgcgtggaacagggtaaaatagaggttcaaccacaggactaaaatgagcgagaaacgttgatgtcgaattcttatgactcctcaagtatcaaggtattaaaagggctggatgcggtgcgcaagcgcccgggcatgtatatcggcgacaccgatgacggcaccggtctgcaccacatggtattcgaggttgtggacaacgctatcgacgaagcgctcgcgggccactgtagtgacattcaggtcaccatccatgccgacaactcggtatcggtgcaggatgacggccgcggcattccgaccggcattcacccggaagaaggggtttcagccgcagaggtcatcatgaccgtgctgcacgccggcggtaaattcgacgacaactcctataaagtttccggcggcctgcacggcgtgggcgtctcggtggttaacgccctgtcggagaaattggagctggtgatccgccgcgaaggcaaggtgcacgaacaaacctacagtcacggtgagccgcaggcgccgctgaacgtggtgggcgaaaccgaacagaccggcaccatggtgcgtttctggccgagccaccagactttcaccaacgtgaccgaattcgagtacgacattctggccaagcgtctgcgcgagctgtccttcctcaactccggcgtgtccatccgcctgaaggacaagcgcaccgaccgtgaagatcacttccattacgaaggcggcatcaaggcgtttgtcgagtacctgaacaagaacaaaaccccgatccacccgaacgtgttctacttctccaccgtgaaagacgacatcggcgtggaagtggcgctgcagtggaacgacggtttccaggaaaacatctactgcttcaccaacaacattccgcagcgcgacggcggcacgcacctggtcggtttccgtaccgcgatgacccgtacgctgaacagctacatggagaaggaaggctacagcaagaaggccaaggtcagcgccaccggcgatgacgcgcgtgaaggcctgatcgccgtggtgtcggtgaaggtgccggatccgaagttctcttctcagaccaaggacaagctggtctcttccgaggtgaaaaccgcggttgaaacgctgatgaacgagaagctggtggattacctgatggagaatccgggcgacgcgaaaatcgtggtcggcaaaatcatcgacgcggcgcgcgcgcgcgaagcggcgcgtaaagcgcgtgagatgacccgccgcaaaggcgcgctggatctggccggcctgccgggcaagctggcggactgccaggaacgcgatccggcgctgtccgaactgtacctggtggaaggggactccgcgggcggctctgccaagcaggggcgcaaccgcaagaatcaggctatcttgccgctgaagggtaaaatcctcaacgtcgagaaagcgcgtttcgacaaaatgctctcttcgcaggaagtggcgacgctgatcaccgcgctgggttgcggcatcggccgcgacgagtacagcccggacaagctgcgttatcacagcatcatcatcatgaccgatgccgacgtcgacggttcgcacatccgtacgctgctgttgaccttcttctaccgccagatgccggaaatcatcgagcgtggccacgtgttcatcgcacagccgccgctgtacaaggtgaagaaaggcaagcaggagcagtacatcaaagatgacgaggcgatggatcagtaccagatcgccatcgcgatggacggcgctacgctgcacaccaacgccagcgcaccggcgctcggcggcgagcagttggaaaaactggtggccgagcactacggcgtgcagaagctgatcggccgcatggagcgccgctacccgcgcgcgctgctgaacagcctgatctatcagccgacgctgaacgaaggcgatctcagcgatgaagccaaggtgaagacctggatcgcgtcgctggtgcaggcgctgaacgacaaagagcagcacggcagcagctatgacttcgtgatcttcgagaaccgcgaacgccagatgttcgagccggcgctgcgcatccgcacccacggcgtggataccgactacaagctggacttcgacttcatccacggcggtgaataccgcaagatctgccagctgggcgagcagctgcgcgggctgatcgaagagggcgcgttcatcgagcgcggcgaacgccgtcagccggtagacagcttcgaacaggcgctggagtggctggtgaaagagtcgcgccgcggcctgtcggtgcagcgttataaaggtctgggcgagatgaacccggagcagctgtgggaaaccaccatggatccggaaagccgccgcatgctgcgcgtgaccgtcaaggacgccatcgctgccgatcagctgttcaccacgctgatgggcgatgcggttgaaccgcgtcgcgcctttatcgaagaaaacgccctgaaagcggcgaacatcgatatctgatgcgttaatggctgtgaaaatccgcgccgggcgacccgcgcggattttttttggccttttttggcgctgacagccgaggctgaaacgcgttagcatgaataaaaaccactgggagaagcgttgaatggctattgaactgattgcgatcgacatggacggcacgttgctggatccgcagcatcaaatcacgccggcggtaaagcaggctatcgcggcggcgcggcgcaaaggggtgcacgtggtgctggccaccgggcggccttatgtcggcgtgcaggactatctgcgccagttggacattcagggccccggcgatttctgtatcacctataacggcgcgctggtgttgcgcgcggtcgacggcgcctgcatcctgcaggaaaccctgggcttcgaggattatctgcacttcgagcagatggcgcgcgggttaggcgttcacttccaggcgtttgatttcgataccttgtataccccgaacaaggacatcggcaagtacaccatacacgaggcggaaatgaccggcattccgctgaaataccgcagcgtggaagagatggatcgccagatgcgttttccaaaagtgatgatgatcgacgaaccggcgctgctggacagcgccatcgcgcgcatcccggaggaaacgcgcgcgcgttacactatcttgaaaagtgcgccttactacctcgagatcttacataaaaacgtcgataagggcgccggggtgaaaatgctggccgagcacctcggcgtggcgcgggaaaacatcatgacgctgggggatcaggctaacgatacggcgatgatcgaatatgccggcgtcggcgtggcgatgggcaacgccattcccgagctgaaagcggtggcgcagtttgtcaccagcgccaataccgaagacggcgtggcgcgcgctatcgagaagttcgtgctcaacgcctgagaaaacggggcgctgcggcgcccctttatactttcgccaacacccctttggcgatctgcagatcctgaatcgccaagccggtgagatcggcgatggtgatgtgctgcggctcgcgtcgtacccgcccgccctgcgccaatgcggcgcccatttcgacgatcggcgttgaagtcagcttgttctgccgataagccgtcgcgatctcgccatagtctgtgcactgagccagcgcatcgaccagcagcgcgtccgcgcgggccaccagctcggtcgccagctcctgcttaccgggcgcgtcggcgcccaccgcggtaatgtgcgtgccgggccgaatatccgccgcctgcaaaatcggttcgcggctgggcgtggtggtgacgatcagctgacagtgcgccgccagctccgccgcatcctgcgtgacccgcacccgaaaaccctcagcctcggcatcgcgccgatacgccgccagcgcctgttcgttgcggccccacacccatacctcgcggcaatcggtcaccggtttcagacattgcagctgcagccgcgcctgcaggccggtgccgaccatgccgatcgcctgaatacgcggcggcgcgcacagctcggcgacgatgcggccggccagggcggtgcgcagcgcggtcagccaaccttcatcttgcagcagcgcctgcggctcgccggtctgggcggagaacgccatcatcagcccctgattgctcggcaggccgtgttcggcattgcggtagaaaccggtagagatcttgaccacgaacagtttgtcgcctttcaaccaggcggacttgatgcagcagtcgccggcggcctgctcgaacaggaaatgctgcaccggcggctgttgcacccgctgttgcgagtaggcgataaaaccctgcttcagcagcggcgtaatggcctcggcgtcgaacgcggcgaggatttgctgctgattaaggatgcgcatcggcgatggccttgaggtatttctccagcacgatgtttttaccgcacagcaccaccgccacctttttacctcggtattccggcgccagtttgatcgccgccgccagcgccacgccggccgcgccttcgataatccagcgatcgctggcggcgatccggcgcatcgcgtgtttgatctccgcctcgctgaccagcactttacggtcaatcagctgctggcacagcgggaaggtcacggcacccggctcgacgccgccggcggtgccgtcggacagggtttcttgttcttccaccgagaagatatggccggcttccagcgcgctgtacaggctggtggcgttttccggccagcaggcgataagctgcgtgttcggcgacagttgccgcaaaacggtgccgatgccggcgatatagccaccgccgccgaccgccacgaacaccgcgtcaagatcggcgagttgttcaaccagctccatgccgcaggtgccctggccggcaatgacctgctcgtcgttatacggcgagatgtaggttttcccctgttcgcgtgcggcttgttcccccgccagttcggcgttcagcgcgtcgcccggcaccaattccacggtgccgcccagcgcccggatggtgtcgagcttgatgctcgccgccgtctccggcgcataaaccgtgacgccaacgcccatccgttgccccgccagggcgacagcctggccgtggttgccggttgaggcggcgatcacgccgcgccggcgttgctcgttatccaacagccgcagcttgttgctggcgccgcgaaatttaaaggaaccggtgtgctgcaggtggtcgcatttcagatacagctcgcagcccaactgctgagaaagcagcacgctgcgctccagcggcgtgacccgcacctgagggcgcagttgctgatgagcggaaacaatggcatcgaagagggtgttcataccggctccagaagatttatttggacttaaaaatccagtttgtacttttttgtattgattgtaaaccctacccacaaccgtcggtcaaaaccggtcatggcattgtgtgatcgcgcttacggctaaaaataatcgttaaattatagtttaacggcacgattttttatttatttgcgttaaggaagtcgcagtctctcatttatttttaattagggaacgataatgaaaaaaatattgctcgcttcattaacctatgccgcgctgacgccgttttgtttcgccgccaaggatgtgaccacccagccagaggtttattttctgcaagaatcgcagtcgatagatagcctggcgttattaccgccgccgcccgcgatggacagcatcgattttatgaatgacaaggcacaatatgatgcaggaaaattattgcgtaatactgaacgaggcaaacaggcttataacgacgctcaggttaccggagatggcgttgccgccgctttttccggcgcattcggtacggaaattgcgcaggataaaacgccggagctgttcaagctggtgatgaaaatgcgtgaagatgcaggcgatctggctacccgcagcgccaagaatcactatatgcgcattcggccattcgctttctaccaggaacctacctgtcgcccggatgatgaaggcacgttatcgaagaacggctcctatccttcagggcataccaccatcggctgggcgaccgctttggtgctggcggagatcaatcccgccaatcagggggcgatactgcagcgtggttatgagatgggccaaagccgagtgatctgcggctatcactggcagagcgacgtgaccgccgcgcgcttggtcgcttcggccatcgttgctcggctgcatgcggagcccactttcgctgcgcagttgcaacgggccaaaacggagttcaacgccctgaaaaagtaaccttgcctgcaaacggcggcggcgatatgaaacgctgcgggcgatccggtaagatgacggctcagtgccagcatgtgcaggagagccgccatgagccatcgggaaaaacaactgactttcgaccctcgtgggcatcagttaaccaatatcaacgtctggacgccggacagtcaatggctggcttatgacgtgcgcccgcgcggcgcctctttcaccggcctcagcatcgagcgtgtcaacgtcgccagcggcgcggtggaggtgatttatcgcgcccagcacggcgcccacgttggcgtggtcacggtcagccccgatgcgccggcgcgctatgcctttattcacggacctgagcacccggacagcgcctggcagtatgattttcaccaccgccgcggggtgatcgtcagcgaaccggatcgcgagttggccatcaccctcgacgcgctggatatcaccgcgccctatacccccggcgcgctgcgcggcggcagccacgtgcacgttttcagtccggacggcagccgcctcagctttacctacaacgatcacgtgatgcatgaacgcgatccggcgcgcgatctgcgcaacgtcggcgtggccgtgccgctgcacggggttaatccgccaaaacagcacccgcgtgagtacgacggcagccactattgcgtgttggtcagcgagacggtgccgcagccgcagccgggtagcgatcagatcaatcgcgcttacgaagaaggctggatcgggcgcgaaggctaccgtaaggccgacggcagccggcagcgctgggcgctggcatttatcggcgatacgttgtccgctgccggagagaagctgtctgaggtgtttatcgtcgatctgccggagaacgacgtcgactacgcccgggcgggcgctctgccgctgcaggggacggaaagcgagctgccggcgccgccgcttggcgtcaggcagcggcgggtaacctttaccggggatcgccgttttcctggcgtggctggtgcgccgcgccactggttgcgcagttcgccggacggcagccagatagcttttctgatgaaggacgacggcggcgtggtgcagctgtggacggtgtcgcctaacggtggcgagccgcgccaggtgagccgcagcgagcatgacatccagtcggcgttcagctggcacccgcagggcgggacgatagccctggtgtgcgacaacagcgtgatgctgtgcgaggtggccagcggtcgcctgcagcgtttgacgcagcgcagcgtgcagccgccgtcgggggatgccgtggtgttctcgccggatggcaagaaagtggcgtttatgcgcgagatagcggggttcaaccagatcttcgtggttgaggcgtaaggcgggcctgatgacccgctgcgtgcgcgattagtgcgtggcggtgctgtcgtcgccctggccgggattgccggtcgccgccaaattctgctgctcgctgcgcaggatacgcgcttttggcgagtctgcggtggcgtcgttgccggatcgcagatagtcgtaaggcagcagcacggtatccatcaccgcggagaacggcagatccagcgccaccagcggcatcatcgcccaactggtgttgtcgtccttcagcatgtccacgctggcgcgggtgccgggatagtaaccctgattcgggccggtatggctcatcacgctggagcaaccgctggtcgccaacaacatgcagcccgtcgctatcgctttcatcatcgtcattaatccatcctgcagggttgctgtgcccctaaattaagctgatttataacatcctgttgctgctttaaaagaagcaaaatcccgctctgtggcggctctctcactttagtgtaagtggtaaaaaaaacttttaccttattggtgcaaatttttttgatcctcgcctgttgaattgatgaaagcaacccccattttatcatcagagccgaattgagaattcgccgtaagggaattctggcttaattagcctgtccagagtggaaggcgtatttatttcaacctcgctgaagtgccttaggaggctgttttatgcgtaattttgatctttccccgctataccgttccgccattggtttcgatcgcctgttcaacgcgctggaggctggccagagtcagggcaacggcggttatcccccttataatgtcgagctggtggatgaaaatcattatcggatcgccatcgcggtagccgggtttgccgagcaggagctggagatcaccacgcaggacaatctgctgatcgtgcgcggggcgcacaacaatgaaccggcagaaaaaacctatttataccagggcatcgccgagcgtaatttcgagcgtaaattccagctggccgaacatattcaaattaaaggcgccaaactggagaatggcctgttgtatatcgacatgcaacgcatcgtgccggaaacattaaaaccgcgccgcatcgaaattaaataaatttccgtttcgccggcaggtacgctgccggtaaatatgaagtcatgattagcctgccgtcagggggctgaataaacacatctcgcttaatgaaaggagttgttcctatgcgtaattacgatttatccccgcttctgcgtcagtggattggttttgataaattggccagttcaatgggcggccaggaaccccaggggttcccgccgtataacatcgagaaaagtgacgacaatcactaccgcatttctctggcgctggccggtttccggcagagcgaactgaatattgaagtggaagggccgcggttgaccgtcagcggtaaacccacgccgccggaaaaacaggtcgagtacctgcatcaggggctggtgtgcaaagagttccagttgaccttcaccctggcggaacacctgcaggtgtccgaggccaaatttgaaaatggcctgttgcacatcgatctggtgcgtcaggtgccggaagccttgcagcctcagcgcatcgccatcggcgcgacgccggagctggaagcgaaataaccggctgaaaaacggccatcatcatgcgggggagatccaaacggatctcccccgttgcgttatgtggcgcacgccacagtcccctcgtctgcccgatgccataatccttgttaattgtgtgtctttggccgcaaatcccatgttcaactttggcaaggatgtgacctatgagcgatatcgccctgaccgtcagcatgttggcgttggcggccgtcattgggctgtggatggggaactggaagctgtatggcgtcgggttgggcattggcggcgtgctgttcggcggtatcctggtcggccactttgcccagagcgggcaaatcagcctgaatggggacatgctgcactttatccaggagtttggcctgatcctgttcgtctacaccatcggcatccaggtcggccccggtttcttctcttcgctgcgcgtctccggtctgcggctcaacgccttcgcggtgctgctggtgctgaccggcggcatcgtggcggcggcggtacacaagctgttcgacgtgccgctgccgatcatcctcggcgtgttctccggtgcggtcaccaacaccccggcgctgggcgccggtcaacaaatcctgaccgatctcggttccgatccggcgctggtggacggcatggggatgggttacgccatggcctatccgttcggcatatgcggcatcctgctggtgatgtggctgatccggctgattttccgcatcaacatcgagcgtgaggctcaggcgtttgaaagcagtctgggcaatcagcgcgagttgctgcacgccatcaacgtggcggtgcgcaaccccaatctgcagggcatggcgatcaaaagcgtgccgctgctcaacggtgaagcgatcgtctgttcgcgcctcaagcgcggggagctgttgatggtgccggcgccgcacgagcggctggagcttggcgactacctgcatctggtgggcaaacgcgaagatctggagaacgcccggttggtgatcggcgaagaggtggatgcctcgctgtcgacgcgcggcactgcgctgcaggtggtgagggcggtggtgaccaacgagcaggtgctgggcaagaaaatccgcgatctgaatctgaagcaaaagtatgacgtggtgatttcacgcctcaaccgcgctggcgtggagctggtggccggcagcaacgtgacgctgcagtttggcgacattctcaacctggtcggccggccggaggccatcgacgcggtgacggcgattgtcggcaacgcccaacaaaaactgcagcaggtgcagatgctgccggtctttatcggtatcggcctcggggtattgctcggttccattccgctgttcgtgcccggcttcccggcggcattgcggctggggctggccggcgggccgctggtggcggcgctgatcctggggcgcatcggcagcatcggcaagctgtactggtttatgccgccgagcgccaacctggcgctgcgcgaactgggcatcgtgctgtttctggcggtggttggtttgaaatcgggcggtaacttcatcgatacgttgctgcacggcgaggggctgacgtgggtcgggtacggcgccttgatcaccgcgattccgctgctgagcgtcggtattctggcgcgcacggtgggcaagatgaactacctgacgctgtccggcatgctggcgggatcgatgaccgatccgccggcgctggcgttcgccaacggtctgcatcccaccagcggcgccgcggcgctgtcttacgccaccgtttatccgctggcgatgttcctgcgcatcatgtcgccgcagctgctggcggtgctgttctggacgctgtaatccaaaaaaaggcgccgtagcggcgccctgatggattgcgcttagttcgcttcctgatgcgcacgctcgatctcttctgccaggatcgccacgccgcgctcgattttctccgggtcgggcacgtagttcatgcgcatgcactggtgggtgtgcggccagtcgtgctccagccccgggaagaagtagtggcccggcaccatcagcacgccgcgctttttcaggcgctgatacagcacctcggtggtgatcggcagatccttgaaccacagccagaggaagatggccccttccggtttgtggatcaggcagcgctccggcgacaggtagcggcggataatctcgatggtgtgttcgacgcgctgtttgtaaaacgggcgaatcacctcgttcgacaggcgcagcagatcgccgcgcgcgatcatttccgtcgccatcgccggccccatgctgcccggcgacaggctgatgatgccgttcatgttggtcagcgcggtgatcaccttctcgtcggcgatcacgatgccgcagcgcgagcccggcaggccgagtttggacaggctcatgcacaggatggtgttcgggttccacagcggcgtggcgtcgctgaagataatgccggggaacggcacgccgtaggcgttgtcgatcaccagcggaatatcgcgctgctgcgccagcaggtcgagcttcatcagctcttcgtcggtgatcacgttgccggttgggttggtcggccgtgaaacgcagatcatgccgatgtcgtcgccgatggtgaggtgttcgaaatcaacgtgatatttgaactggccgtccggcaacagctcgatgttcggtttggcggagacgaacagcccttcgtccagcccggcatcggcatagccgatatattccggcgccaatgggaacagcacgcggcggcgcgaaccgtcggcgtagcggccggcgaacaggttgaacaagtagaaaaatgcgctttggctgccgttcgtcagtgcaatattctgtggcgaaatctcccagccgagctcgtcgcgcagcagattggccagcgctttcagcagcgcgtccttgccttgcgggccgtcgtagttgcacagcgcctcggtcagtttgccctggtcgagcatctcctggcacagctgtttgaagtaggcttccatctctgggatctgcgccgggttgccgccgccgagcatgatggcaccgggggtgcgcaggccttcgttcaggtcgtccatcaaacgggtaatgcccgcataacgggtaaatttttcgccgaaaagtgagaaagtcataggtgcagcagtactgttttttagcaggtaatcccccaccataccgccagacaaattcctctgcaatgcggccgacaaatcgaccaatgggcaaaagctttgctcattagccgattgtcagcatattacgctgtattattgtgaccgttcgccggcccataccaccatcaccttatcgtcgccgagtcgacggctgaaggcatagtaggcggcatgcggctgcggggtttgcacgccgccaccgatcgccgggtggcgagcgcggaactgccccaaccgttgccagtgggccagcagcgaggctttttccccctgcaactcaggccagttcatgtcggagcgggtgccctgcagcggatcggaaccggttgggccgagcgggcggccgctttcatcgccgtagtaaatctgcaccgcccctggcgccagcaacagcaggttcgccgcccgctgttggcgcacctgcgagcctttggcgtcgctggcgaagaacagccgggtgtcatgtgaagagaggtagctcaacacgttgaaatcctgcagccgctcggccatctgtcggtaggtggcatcgatgtcggcaaagcagcccagcgcctgcgacgcctggtcctggaaatcgaagttgatcatcgcgtcgaagccgttttggtaatagtcgcttttcatcaccccgtggccccaggcctcgccggtcatccaaaacggcgcgtcatccagcgcctgctgcggatgctccgctttccacgccgccaatgccgccgtggcgcgccgcttcaacagcgccagcgtcggtttttccacgtgcttggcggtgtcgacgcgaaaaccgtcgatgccgtaatcacgcacccactggctgagccagacggtcaggtaatcgcgggtggtggcaccgggcatgtcgcgagcggcggtgtcgggtttgtggcgatagaacagcggcaggccgctggcgccgggcgcttcggttttgatgtccggcaggaaggccagcgacatcgtcaggtcgtcatagcccggcgcgtcatagtcgccgatgtcggtgcggatccagtttttcccccaccatgggcgccagcccgccttgtcgctgaaattgatgtagtcgttgaagctgtgccagttttgccctggcccggggcgccagtcgctccagtttttccccagggttttctccacctctgcaccctgcagatacagcgagccgaagtggaacgtttgcatatccgccagcgtggcgtagccgacatggttcaccaccacgtcgaacagaatgcgaatgccgcgctgatgggcctgctcgaccagcgtgcgcagctcctgttcggtgcccatgttggcgtcgaggcgcgtccagtccagcgcgtaatagccgtgataggcgtaatgcgggaaatcgccttgggtgccgccgccgacccagccgtggatctgctccagcggtgagctgatccacaaggcgttgacgccgagctgctgcagataatccagcttctgcgtcaggccggccagatcgccgccgtgaaaggtgcctatttcctgcaggccgtcgctgcggcgcccgtagctgtggtcattggccggattgccgttctcaaagcgatcggtcagcacgaagtagaccgtggcgttatgccaactgaacgccgccggtttcgccgtggcggcagattccagcagcaacaggccgccgctggcggcggcgggctgcagcgtgattttcccctggctcacctgcgccgtttggccggaatagaaatcgcgcagcgtttcgccttcggtgaaggtggaggcgacgtcgaccgtgaccggcttgccgtcccagcgcgggcagctgcgcacggcaacggcggcgctttccggcgcgctgctcaggctgagctgcagcgtcggcgtgccgctgcgggtgtcgatgcgcacctgataatcgccggcgcggaactgccgccagctggccggcggatgggcgccgcagggctgcagcgacagcgtttggttaagcttcaccgcctcggcgggctgccagcagtggttatcctgatacagccgcagcggcagttggcctttgggcagcgcggcctggctggcgaacagcccggcggcagtttcgtcgaaggccgggaaacccgccaacgtccagccggccagtgccgaaggcgacagcagtatcaacaagggcaggggtaacagtttcatggctctccttacgcgtggcaggaagcgttttttccgctgggtagcgccagtgtggcaaacggcggaaaaatggcctcctccctgcgagggtttttcggggaggaggagaagggcggagcgttttcggattgattcggcttggctttgcgcgcgcgctgcggcagattaaacgatgaacatcaaaggaggttagcgatgacggacaaaaactggcgagaagagatcgttcgggcaattcaggatgccgaattgcagcacttcgccgaagaacatcagctgcaggcgctgttcgcgccgcagcaggaagagcaacacggccggttatccgcagaccaccggccgcgctgagttatttccgcaacagctgcggattgacgcagttttctttcaccgtgccggtcaatgccgcgatcaagttatccaccgcgcaggcggccatgccgtagcgggtttcatgggtggcggagccgatgtgcggcaacgccaccacgttcggcatgctgagcagcggcgaattggccggcagcggctctttctcgaacacgtccaacccggcggcgtggatcacgccgttttgcagcgcttcgatcaacgcctgctcatccaccaccggcccgcggccggcgttgatcagaatgccgcttttcttcattttcgccagctgatcgcggccgatcagatggaaagtttgttcggtcagcggcaacgtgatgcaaacgaaatccgattcggccagcagggtatccagatcgcagcgacgggcgttgaagcgttgctccgcctcttcgtgcgtgcggcgggcgttgtacagcaccggcatgccgaagccgaagtgcgcgcgctgcgccagcgccaggccgatgcgccccatgccgaggatgccgatggttttgtggtgcacgtcgacgccgaaccagtccggcccgatgctgccgcgccattcgccggccttcacccgctccgccacttccaccacccggcgcgcggtcgccagcaccaggctcatgatggtgtcggcgactgtttcggtcagcaccgtcggggtatgcatcagcagcacgttatgggcgttgagcgcctcgacgtcgaagttgtcgtagccgacggaaacggtcgaggccgcgcgcagtttgggcgcctgctgcaggaaagcttcgtcaattttaccgccggaaccgatgatcccttcggcctgctgcagcgcctggcgcagttcgtcgcggttctccggctgcaggccgttgaaggcgtgcacggtgaagtgctgttccagacgttcacgcagatcggcgggcaggcttttgtacaatacgatagaaggcttcatcacgaactccagctgggccaaagggggcatggcgcccccccggttgggttaacagagaaaaagtataaccggatcaagccaattgtggctggatctcgttgcgggcgggcttgacgatcagcgtcagcaccaccgccaccaccagtgcgatggccataaacatgtaagaggccgccgggctgccggtggcgccattcagatagccgacgaaccacgaaccgaagaacgaacccagcgcgcccatgctgttgatcagcgccatggcgcccccggcgacgtttttcggcagcatttccggaatgatggcgaagaacggcccataaggggcgtacatcgcggcgccggcgaccaccagcaggccgtaggagatccagaagtggttggtgccgacggcgtaagagccgaagaacgccagcgcgccgatcagcagcagcggccagacgaacagcttgcggttttgcattttgtccgacgcccaggagacgacgatcatggcgatagttgccgccaggtaaggcaccgccgacagccagccggcttccaccatgcccatctgcatgccgctgcgcaggatggaaggcagccacagcacgaagccgtacacgccgatgctccaggcgaagtactgcacgcacaacaggatcacgttgcgtgagcggaaggcttcgccgtagttgcgcacggccttgatgcctttctgttcttcgtccaactgctgttgcagcgcctgtttctcatcggcgctcaaccagccggcctgcgccggtttgtctttcgccagcacccaccagcagaacgcccagataaccgccggaatgccctcgatgatgaacatttcgcgccagccgaaggcgtggatcaggtagcctgacaccacagacatccacagcaccgtcaccgggttgccgaggatcaggaaggtattggcgcgtgaccgctccgatttggtgaaccagttgctgatgtagatcagcatcgccggcatcaccgccgcttccaccacgccgaggataaagcggatggcggccaacatcgggatattgctcaccacgccggtcagcgaggcgcaaccgccccacaggatcaggcaccagaagatcaattttttgacgctgcggcgttcggcgtagatggcgccgggaatttggaagaagaaataaccgaggaaaaacagcgcgcccagcagcgaggccatgcccttggtgatgccgagatcctcattgatgccggcggcggaggcgaagctgaagttggcgcgatcgagataggccaggctgtaggtgataaacacgatgggcatgatgtaccaccagcgtttggccgcgacagtcgctttgttcatgttcagtatccttcagtggtgttgcatccccttcgcccggcatgccagaagaaggggcagatgctctcccgacgcgtcccggttgtagggccagaggctgacgtcatgcggagaagtcgtttttttattgttattcggccagcgccgcgcgggtcggcaggccttcgctgtcgccgatggcctggatcgccagcgaaccgattttgttgccgcgctgcaccgcctgtaccagcgttttgccttccagcagggcgctgagggtgccgacggcaaagccatcacccgcccccacggtatccaccacgttgtcgaccttgactgcggccaccgccgccttatcgccggcggcggttttaaaccaggcgccgtccgggccggttttgatgatcaccgcctgcacgccgcgttccagatagaaatcggcgatgccttccggcgtcgattggccggtgaggatctgcccctctttcagccccggcagcacccagtcggcggcgaacgccagctggttcagctgctcgatcatcacctcgcggctgggccacagcaccgggcgcagattggggtcgaacgaaatggttttgcccatggcgcgcatctcgcgcgccgcatggtggcacagcgccagcgattcgccggacagcgccgccgccacgccgctcaggtgcaggtggcgcgcggaaccgaaatactcgcggttaaaatcggcaatcgacaggtggctggccgccgagcccttgcggaagtactccacgctgggatcggtaccatcggtggttttggatttcacctgaaaaccggtcggatagtggccatcgaccgtcacctgccggtagttgatgccttcttttttcagctgctgcagggcgaagcggccgaacgagtcattgccgacgcggctgacccagccgacgttcatgcccagacgcgccaggccgatcgccacgttcagttcggcgccggcgatgcgtttggtgaaggtttccacctccgccaggtcgccggtttgcgccgccacgaacatcgccatggcttcgcccagcgtgaccacatccaggggcgtctgctgcgccgtcgttgccgttaacgttgtcatcatggggttactccgcacgcaaaatattgacgtaatgacgggtgacggcctccaggtcatcgccctgcaacgggaattcgataccgcgcggcgcatcgtgcggcaggcgggccagcagatcgcgccagctgccgtcggtatcgtccagcgcgacggcgcgccagccgcgcgggccttgggtggcggctttgacgtgcacgtaaccgacgtggcgggccaggcgctcggcggcggcgaaggcgtcttgccccacccacagccagttggccatatcgaaggtcatgctgaccggcagatggctatcttccgcggcgtggaaaaaggcgttcagcatcgacaaaatgccgcagtccggcgtttggtcgttctcgaccaccagcttgaccgggtgttgctccagcgccactttcagctcggtaaaatcgaagccggggcggaaatgaccgagggacagcttcagctggcgcgcgttcagcgcctgcgcttccgccagcagcgccggcaggttggggttcagcgtatgttgcggggtgaacagcgcctcaggggcggagtagacggcgaacagctgctggcgatcgatctcttgcgccagcaccggcaggctgtccagctcgccggcggcgaacagttcgcggcggatctccaccccgtcggcgccagcgccggcgatgaggggcaacagcgcgcgctggccgccgtgttgtttgacggtatcggtgccgtaggcgccggtgaccacgatgatttctgttttcattttgactcctgaggcggcattgtcgccgccgctgctgttaccggtacgttaaatggaaccggttccagcgaaaagcggcagagtgtaaaaatatgatcgcaatcacgaagctgagcaaaaaacagccggtgagggcgggacggttaacgccccggaaaaggcgggttagcgggtggtggagccgcggacgatcagctcgccggagaacatctgctcgccgctgggggcggccaggccctgaatgcgatgcaccagccgctccagcgccgcgtgccccatttggtaggtgggctgtttcagcgtggtgatgccgacgcccgccagttccgcccactccagttcgtcaaagcccagcaggccgatgtcgttgccccactggatgccgagccgacgcatggcgcgcgccacctgcagcgtcagggcgccgttggcggagatcaccgccttgcgcatgccgcggtggcggccgctgaaatcgctcagcacctgctccagcttctgccgatcgttgagcggcgtttcggcctgctccgccaacagcgcggggtgctgcgccatggtatgcctgaaggcgtgcaggcgttcgaggcgggtattgaccgtaccgagcggctcgctgaggaacaggatcgcttcgaaaccttgttgcagcaggtgttcggtggcgacggtagcggcttcgcggttgttcaggcccaccacgtcgcaggcgaaatcggggattttgcggtcgatcagcaccatcggcagcatcgactgttgcagcgtggataacgcttcctcgcgcatgccgaccgcgttgaccacgataccttccacccggtaactgctgagcaactgcaggtagtgctgttcctgattgacttcgttgttggtattacacaccagcagggtaaagccgtgctggcggcaggcggcctcgatgccgcgcatcacgtccaccgagtagggattggtgatatcggcgaggatcaggccgatcaggcgggtctggccgcccttcaggctgcgcgccatctggcttggccggtagtcgagctgctggatcgcctgttcgatgcgctgtttgagatcgtcggaaagcaggtgttgttcaccattcagatagcgcgacacgctggtcttgccggttttggcgatgctggccacatcgctgatggtggcgcgtcccgatgcgcgcgttgccttgacagtgctcacagccgatccctcctgcggttaattgccaaggagactaccatacccgatgtgcgggcgggaatgttgaagggtaaggagaaaatcgcagggaggcggcggggcgcaggtggcgccccgcacgggattactgcagcgggctgagcgtgatctcgacgcggcggttttgcgccttgccttccgcggtgctgttggaggcgatcgggttgtccgggccggcgccggtggtgcggatacggttcgccgccacgccctgggtgatcagcgcgctggctacgccgtcggcgcgctgctgcgacaggttcatgttgagcgaacgggaaccggtgctgtcggtgtagccgaccacgttgaccgcggttttcggatactctttcagcaccatggcgacgccggtcagggtgttggcgcccgccggtttcagcgtggcgctgctgctgtcgaaggtcacgttgttcggcatgttcagcacgatgttgtcgccctgacgggtgacgctgacgccggtgcctttcatcttgtcgcgcagtttggcttcctgcacgtccatgtaatagcctacgccgccgccgagggctgcaccggccgctgcgccgatcagcgcacccttgccgcgatctttcttggaagaggacagcacgccgacgccggcgcccagtgcggcgccgaggcctgcgccgatgccggatttgccggcttcggattcaccggtgtaagggttggtggtacaggccgacagcgcgagcgtaaggctcacggcgccggcaataattgcaatgcgttttttcatgttcttgtccttaatggcatcagaatctgtacgcgccggcccaaaacggggacgcaaaaaagtgggtgacgcagggagcccgcatcgccgcgctacctatgacgcgcgctttcgccggcagttccggagaaaaacgtgacaaatgatgagcgcgggtaagtgctgggggagttatgcggcaaaacgccgggcggcgccatgcagcggattcctaattgtgcgcatccggggtgcggatgcgccttttttaagcgtaaccggttgagttttcgactgccggccagttcatgatcagcgtataggcctgggtttcatcattgaacaggcgctgcgttatctgaaagccgtgcttgtggtagaacgcgcaggcgcgcaggttctgttggtacacctccagactgagtcggcggtagcgctgttgcacgtgcgtcatcagcgcctgggcgacgccgcggccgtgaaacgcccgatcgacaaacagcgcgccgatgaactgctcgtccagcacgctgataaagccgacgatctcgccttcgtgccagcaggcccagctttgcgcgcgcggcaggtagttttcccgcaccagcgcggcgctctcacgccagtatttttccgccacgaacggatgggcggcgatggtgctgggcagccacagcgccatcagccgttcgatatcctccgggccacaggggcggatcaccgtggctttgggtaacacatgcaccccgtgagatgatcgttcaccagcccgctggcctgcatgaaggcgtaacagatggtggagccgataaacttgaagccgcgctttttcagcgccttggacatggcgtcggactgctcggttttggccggcacctggttcagcgcttgccagcggttgagctgcggccggccgccgacgaagtcccaaatgaaggtaacgaaattctccccggccgcctccatcgccagataggccttggcgttggtgatgatggcttctatcttgccgcgatggcggatgatgccgctgtcctgcagcaggttttccacgtcttgttcggtcatggcggcgacccgctgcggatcgaaaccgtggaaagcgcggcggtagttctcgcgctttttcaggacggtgatccaggaaaggccggcttgctgcccctcgaggcacaacatttcaaacagctcgcgcgcgtcggtggtgggcgcgccccattccttgtcgtgatactcgagatacaacggatcggccgtcacccaaccgcaacgttcgtctgccatcctgaatgtccttatgctgtgtttatgaacagtaatcatcgctcgaagcgccgaacttggcaagtctctgattgttttgtcatcagcccgcttgacgtgacgaaaaagccgacaatagttactacatggccggtggaaaactgaccaacgataaaaacgacatggccttcatttgcaggctctcaggagtcgattcatgcctctaaaaataacgtgcatgccccgcccggcggcgcttgcagtggcgttactttgcagtgtgacccttccggctcaggcgtacgatcaactctacgtctttggcgacagcctgagcgataccggcaacaacggccggttcacctatgacggcagccagcacctgctgtacgacgaagcgttggcgcaacgcatcggggcggcgctggtggcttcggacaacggcggtgagaactacgccgccggcggcgccgtggcggtgccgggtctgaacccggccgacaacacccaggagcaggtgcagcgctatctgaaccgggtcaatggccaggccgacggcgacggtttgtatattcattggatcggcggcaacgatctggcggcggcggcgctgaatgccgctaccgcgcccggcgtggcctataacagcgccgccgcggcggccgcgcaggtgcattcgctgctgaacgccggcgccggcacggtgatcgtgccgacggtgccgaacatcggctccacgccgcagctgatggaattgatcattcaacaggcgctgtctccggtgcagggggcggcgatccaggcggcctatgccacgcttaattcggtggcgacgccggacaacgcttcacgcacgcaggcgatccacgcagcgttggccgctgcggcgaagcagggcagcgccattcctcaggtgcagcaggcgatcgccgcgcagcttatcgcggcgtatgacggcctgagcgcgcaggccgctcagctgaccgatttctataatcaaagcgaagaccgtttgctggcgcaggggagcggcaatatcgtgcgggtggacgtcaacaagctgttcgccgaagcgatcgccaatccggcgcagttcggcttcgccaacaccgccggcatggcttgcccgccgggcgtttcctcggcggtttgccgttccgacatgcccggcttcgacgccggccagtcctatctgttctccgaccatttccaccccagcccacaggcgcatctgctgattgcggattatatccaggcggtgttggatggcccggcgcaggtggtggcgctgaatcaggcgacggcggcgatggcgcgtgacagccgcgccacgctcgacagccgcttccagcagctgcgcaacggcgacaacccgcagggttcgctgggcgtgttcggcggttacgccggccagcactacgactatgccgataaccgggccgcgggggacggcaacgctaccacccacaacctgaccgtcggcgtggactatcagctgaccgacagctggttgatcggtgcgttgatcgccggttccaacgacgatcagcatccttccagccgctttgattacaaggcgcgcgggctgctgctctcggctttcagttcactggcgatattcgagcacggttgggtcaacgccgatctgcactatgcgacgatggattatgacgacatccgccgcagcatgcggctggggccgctgacgcgcaccgaaaccggttcgaccaccggcaggcagtggggggcgcgcgtgaccgccggctatgacttcccgatcgcttcttacctgaccaccgggccggtggcgcagttcgcctgggattacagccgcgtttccggttacagcgaagacggcgatgacagcaccgccatgcgcttcaacgatcaaacctaccactcgcagatcggtgcgttgggttggcggctggatacgcaattcggcgtgtttaacccttatgcggaagtgagttatcagcatcagttcggcgacgacgtctaccgcgccggcggcggcctgaaatcgacgcaaacctcatttactcgcgacagtgcgggtcaggacaaaaactgggtggatgtcacgctcggggccaacatgccgttgacggacagggtgtcggccttcgccaccgtctcgcaaaccggcggcctgagcagcggcgagcagtttatgtataacgtcggcgtcagcgcgcgtttttgaatggggtgcctgcagagcgcgtttgccaaaggcgtgctaaatggcattgcgtaagcgatacgttcttataagggaagctaattaagaggaagaggacgggaattaattatgcgggccgccataatgctgacggaaatacaaaaaaaaactgatcctatgaaaggatcaggtagccacttggccaacaccagggaaaattttaattattattgtataaccaaagattaactgtcaatgggtttatgtggctcattgttggcgtattacatatccgcttgtttctcctcgagtcgctgccgcggcccatcgcgtgatctctccttatttttcacgatataagaaataatttggcggttagtcacattatctgccggtgaggcgagttttttagttgataaaattaacaaaaataacattggcgtaactttgccctgtggcaaatataagcatgtgtgcatttcaatctgcgtaaatagggttggtgagaacaggagctgcgggcgaataagtgacgatttaagcaacgattagtctcgttttttgttaagttattctaatgtttttggcgggtcgtattttcgccccgttcgtcgccggtgaaattagccggctaaccggcgccctgtcctgcgcgcgccgcgcgcgaaaatccagcgtttctcgccccgattcgcacttgttgccggattctggctgtatatcttacggtcaacgggtatactggctcattccatctaaatccacttgtatcgcgtgcgaattcaacatgcaaaagtttgataccaagaccttccagggcctgatcctgacactgcaggattattgggcgcgccagggctgcaccatcgttcaaccattggacatggaagtcggcgcgggaacctcacacccgatgacgtgcctgcgcgcactggggccggagccgatggccgccgcctatgtgcagccatctcgccgcccgaccgacggccgctacggcgaaaacccgaaccgtctgcagcactactaccagttccaggtggtgattaagccatcgccggacaacattcaggaactctacctgggctcgttgaaagagctgggtctggatccgaccatccacgacattcgcttcgtggaagacaactgggaaaacccgacgctcggcgcctggggcctgggttgggaagtgtggctgaacggcatggaagtgacgcagttcacttacttccagcaggtcggcggcctggagtgcaagccggtgaccggcgagatcacctacggtctggagcgtctggcgatgtacatccagggcgtggacagcgtgtacgatctggtgtggagcaacggcccgctgggcgtcaccacctacggcgacgtgttccatcagaatgaagtggagcagtccacctacaacttcgaatacgccgacgtcgacttcctgttctcctgcttcgagcagtacgagaaagaagcccaatcgctgctggcgctggaaaaaccgctgccgctgccggcctacgaacgcatcctgaaggcgggccataccttcaacctgctggacgcgcgcaaagcgatttcggtgaccgagcgccaacgctacattctgcgcatccgcacgctgaccaaagccgttgccgaagcctactacgcttcccgcgaagcgctgggcttcccgatgtgcaacaagaagaacgagaactaagaggcagccatgactcaacagactttcctggtggaaatcggcacggaagagctgccgccgaaggctcttcgttccctggcggaatctttcgccgccaacttcaccgccgagctggacaacgccggcctggaacacggtgaagtgagctggttcgccgcaccgcgccgcctggcgctgaaagtggctaacctgagcgcggcgcaggccgatcgcgaaattgaaaaacgcggcccggcgatcgcccaggcgttcgacgccgaaggcaaaccgagcaaagcggccgaaggctgggcgcgcggctgcggcatcaccgtcgatcaggctgaacgcctggtgactgacaagggcgagtggttgatgtaccgcgcccacgtcaaaggccagtcggcgcagcaactgctggccggcatggtcagcaccgcgctggctaaactgccgatcccgaaactgatgcgttggggcgactccgacgtgcagttcgtgcgtccggtgcacaccgttacgatgctgctgggcgccgatctgatcccgggcaccgtgctgggcatcgaatccgcgcgcaccgtgcgtggccaccgcttcatgggcgaagccgagttcaccctcgataacgccgaccaatacccgcagatcctgctggagcgcggcaaagtggtcgccgactacgaagcgcgtaaagccctcatcaaacgcgacgccgaactggcggcgcagaagattggcggcaaagccgatctgagcgacagcctgctggaagaagtggcctcgctggtggaatggccggtggtgctgaccgccaaattcgaagagaaattcctggcggtgccggcggaagcgctggtgtacaccatgaagggcgatcagaagtatttcccggtgtatgacgccgcgggcaaactgctgccgaactttatctttgtggccaatatcgagtcgaaagacccgcagcagatcatttccggtaacgagaaggtggtgcgtccgcgcctggccgatgccgagttcttcttcaacaccgatcgcaagaaacgtctggaagacaacctgccgcgcctggaaaccgtgctgttccaacagcagctgggcaccctgcgcgacaagaccgatcgcattcaggcgctggcgggctgggttgccggccagatcggcgccgacgtcaaccacgccacccgcgcgggcctgctgtcgaagtgcgacctgatgaccaacatggtgttcgaattcaccgacacccagggcgtgatgggcatgcactatgcgcgccacgacggtgaggcggaagacgtcgccgttgcgctgaacgagcagtatcagccgcgctacgccggcgatgcgctgccgcagtcgctggtggcctgttccctggcgatcgccgacaagatggacaccctggccggcattttcggcatcgggcagcatccgaaaggcgataaagacccgttcgcgctgcgccgcgccgcgctgggcgtgctgcgcatcatcgtcgagaaaaacctgccgctggatctgcagaccctgaccgaagaggccgtgcgcttgtacggcagcaagctgaccaacgccaaagtggtcgatgaggtggtggaattcatgctgggccgcttccgcgcctggtatcaggaagaaggccacgcggtcgataccattcaggcggtgctggcgcgccgtccgaccaagccggccgactttgacgcgcgcgtcaaggcggtatcccacttccgcacgctggacgaagcggcggcgttggctgcggccaacaaacgcgtctccaatatcctggccaaatctaccgaaacgctgaacgacagcgtgcgcgcctcggtgctgaaggacgcggcggagatccagttggcgacccacctggtggtgctgcgcgacaagctgcagccgtacttcgcggcgggcaattaccaggaagcgctggtggaactggctgcgctgcgtgaaccggtggatgcgttcttcgacaacgtgatggtaatggcggacgatgcggaagtgcgcgtgaatcgtctgacgctgctgagcaaactgcgtgaactgttcctgcaggtggcggatatctccgtactgcagtaaacggctctgtgctgtgaaaaggcgcctgcgggcgccttttttatttccgtttcctgggtgcgaaggcaaggtcgcctggcgacttggggggcgacttggggaaattgaagcatccggtcgccgacggcaatgaacctcagtgcgttttgcgcacgatgttcaaccgcctccggccgagacaatgttcaccgcaaacggaatcgcgtatcggaacgccgccagttgatctattcttataggcgcacggagtgcggaaaaaggggcggagtccaatgaaaaagcaggtttataacaggagttatgtcacatggcggtagggatccagagcagaggtttcgcgcgttggttggcaccggtattggcattgttggtggtcatgcaattgaccgcctgcggcgataaagagccggaacagcgcaaagcattcattgattacttacagaataccgtgatgcgcagcggggcgaacatccccacgctgagcgaagaccagaagcagaagttcggcaactatgccggcgattacgcgattttggtcggcttttcacagcagctgtccaagtcggtcggcgccagcctgacgccagcgctggatcagattaaccagatccgcaccgcacaggactatctgaacaaacgcgatgcgttgcagcaatcggtcggggcgttgaacctgctgggccagcagatccagtccgccaagtcgcaggcggataccgcccgcacggcgctgaaacagcccgacgatctgaaggcggtgtataaccaggcctatgacaaaatcgtcaccgcgccagccaacgccctgatgccggcaatcccgaccaccgccagctttgtgcaggatctggtgcaggttggcgatttcctgcagagccagggcaatcaggtcagcttcaacaacaacggcgtgcagttccgcaccgcgcagcaggtggcgcagtacaacaccatgatgtcgaatctggtggccaaacagcagaacctggtgaatgcgcagaaagccattcaaagcgtgacgcaataacgcgcctacgacgatctacaggccggcattgccggcctgttttatttcccctcagcgtttccaatagcttgctggtttattacgcaggcttctgtactacacttcaattaatccattcattcggcattgtagttttctttcattcatcacttcgctagttcccggcgggatgagtgctcacagggaagatcaaacagagcgtcgcgttcgggcgctgcagctaaaaataaattgtgatgtttatcacaatttaaaaacaaacaaccaagttaaaaatgtgacattaatcactttattgtcggtttttgggcggtttttttctcactgtgctttttttacacgccataaatgtgatctttatcaccataaatgaggggttgttggggtgttgtgtgtgacttgtgtcacaaaaaattcgtgaagttcgcgtgacaaaaacagcgtgatagagtccgtttcgcatacagcggcaacacggctggatcgtcacaacaataatcacgcgctctattgtcagcgcgtaacaataggggtgtgttttatgttttcaccagacatcaaggttaaagtgcaaaactttggccgcttcctgagcaacatggtgatgcccaacatcggcgcctttatcgcctgggggattatcaccgcgctattcattccaaccggctggctgccgaatgagaccttagccaagctggtcggcccgatgatcacctacctgctgccgctgctgatcggttataccggcgggcggctggtgggcggcgatcgcggcggcgtggtcggcgccatcaccaccatgggcgtcatcgtcggcgccgacatgccgatgttcctcggcgcgatgatcgccggtccgctgggcggctgggccatcaagcacttcgaccgctgggtggacggcaagatcaaaagcggctttgaaatgctggtgaacaacttctccgccggcatcatcggcatgctgttggcgatcctggccttcctgggcatcgggccgctggtggaggtgctttccaagctgctggcggcgggcgtgcacgtgatggtgacgaacaacctgctgccattggcgtccatcttcgttgaaccggcgaaaatcctgttcctgaacaacgccatcaaccacggcatcttctcgccgctgggcatccagcaggcgacggaagccggcaaatcggtgttcttcctgatcgaagccaacccaggcccgggcatgggcgtgctgatggcctacatgttcttcggccgcggcagcgccaagcaatccgccggcggtgcggcgatcattcacttcctgggcggcatccacgaaatctacttcccgtacgtgctgatgaacccgcgtctgctgctggcggtgatcctgggcggcatgaccggcgtattcaccctgacgatgctgaacggcggcctggtgtctccggcttccccggggtcgattttggcggtgctggcgatgactccgaaaggcgcctacttcgccaacattgcggcggtgtgcgcagcctttgccgtctccttcgtggtgtccgctttcctgttgaaaacctccaaggtgaaagaggatgacgatctggaagccgcgacccgccgcgtgcaagagatgaaatcgcagtccaagggcggcgcggccgcgccggcggcggtcgatggcgatctgagcaccgtgcgcaaaatcatcgtcgcctgcgatgcgggcatgggctccagcgccatgggcgccggggtactgcgcaagaaagtggccgacgccgggctgaagaacatctcggtgaccaacagcgctatcaacagcctgccggacgatgtggatctggtgatcacccaccgcgatctgaccgagcgcgcgatgcgccatgcgccgcaggcccagcacatttcgctgactaacttcctcgacagcaagctgtatggcgatctggtcgagcgtttgctggcggtgaacaccgctgccgcagcggccccgcagagcggcgcgtacgcggctgcagaggccggcgaaccggggctgttcaagctaagcgagagcaacgtgttcctcaacctgcaggccagcgacaaagagcaggcgatccgcttcgccggcgagcaactggtgaagggcggctacgttgagccggaatacgtgccggcgatgctggagcgcgaaaagctcacctccacctacctgggcgaatcgatcgccgtgccgcacggcaccatcgaggccaaagaccgggtgctgcgtaccggcgtggtgttctgccaatacccgcagggcgtgcgcttcggcgatgaagaggatgaagtggcccgtctggtgatcggcatcgccgcgcgcaacaacgaacatatccaggtgatcaccagcctgaccaacgcgctggatgacgagagcgtgatcgagcggctggcgaataccaccagcgttcaggaagtgctggacctgctcggcggcaaaaaagccggataacagaatcattttcaagggtgcagcgtgctgcacccttcgacattaagaaggtagagttatgaaagcattacattttggcgcagggaacatcggccgcggttttatcggcaagctgctggcggacgccggggttgagctgaccttcgccgacgtcaatcaaacggtgctggatctgctgaacagccgtaaaagctaccaggtgcacgtggtgggcgagcaagagcgcgtagagagcgtcaacaacgtcagcgccgtcaacagcggcagcgaagccgcggtggcgctgatcgccgaggcggatctggtgaccaccgccgttggcccgcaaattctcgccaaaatcgccggcacgatcgccaaagggctggtgctgcgccatcagcagggcaatgtgcagccgctgaacatcatcgcctgtgagaacatggtgcgcggcaccagccagctgaagcagcacgtgtttgccgcgctgccgcaggacgagcaggcatgggttgagcagcacgtcggcttcgtcgattcggcggtcgaccgcatcgtgccgccggcggacagcagcgatccgctggaagtgacggtggaaaccttcagcgaatggatcgtcgatcagacgcagtttaaaggccagcctccggcgatcgccggcatggagctgaccgataacctgatggccttcgtcgagcgcaagctgttcaccctcaacaccggccatgccatcaccgcctacctcggccaacgggccgggctgcaaaccattcgcgacgccattctcgacccggcgatccgccgcgtggtgaaaggggcgatggaagagagcggcgcggtgctgatcaagcgttacggcttcgacgccgacaagcacgccgcctacatcaacaaaattctcggccgcttcgaaaacccgtatctgcacgatgacgtcgagcgcgtggggcgccagccgctgcgcaaactgagcgccagcgatcgcctgatcaaaccgctgctgggcacgctggaatacggcctgccgcatgccaacctgatccagggcatcgccgccgccatgagttaccgcagcgaacaggatccgcaggcgctggagttggcggaattgctgaacacgctcgggccgaaagccgcgctggcacaaatttccggcctgccggcggaaagcgaggttgtagaagaggccgttgctgtgtataacgccatgcacaagtagaatcgtgatgatgaacacccgagcgcagcttgctgcgctcctggaacccgagttcggcatcgacggccctccccacgcctttcgaaaagcgacgatggaagaagcacaggcatttgaaaaccaggttctggaaaagctgaacgcgggcaaaacggtgcgcagcttcctgatcgcggcggtagagctgctggcggaagcgctcaacgtgctggtggtgcaggtattccgcaaggacgactatgcggtgaaatatgccgtcgaaccgctattgtccggcagcggcccgctgggggagctgtcggtgcgcctgaagctgatgtacgggctgggggtgatttcccgccacgaatatgaagacgccgagctgctgatggcgatgcgcgaagagctgaaccacgacggttcggaataccgcttcgtcgacgacgaaatcctcgggccgttcggcgagctgcactgcgtggccgcgttgccgccggtgccgaccttcctgcagccgggcgaggcggatgaagcgctgatcgccatgcagcgtcagcgctatcagcagatggtgcgctccaccatggtgctgtccattaccgacctgatcgccggcatcggtgccaaacaaccttcccgactctctcctctcggccgcggctaagcgaaggccgcgcgccattcgtcgaacagcaaccacagcgcggtggcggccatcagcccggacatcacgccgttgaaggcgcgcagtttccaggtgacccgcagcgcgttgcgcaaccggtcacccaacaccgcccacagcagcacgcacggcaagttcagcaacgcgaaaccggcgatgatagacagcgtatggacaaaggtggcgccttcgcgcggggtgaacaggatcgccacgttgatcaccatcagccaggccttggggttgaccgcctgaaacagcgcgccgttgagcaggctcatcggctgcgcctgctctttggcgtccggcgaggccgcctgaaacagtttccacgacagccacagcaggtaggcgcagccgatcaccgccagcgggaagcggatgacgccggcccagctcagcgccagcgccagcagcgggataatgatcgccagctgtactgcacaaccgacgcagatgccgaacagcatcggcagggtgcggcgcaggccgaagttgacgcccgacgaggccagcagcaggttgttggggccgggggtgatcgacatgacggtgacgtagctgacaaaggcggagtccagcatggcaggttccttgaaaatgacggtgataacgagaggatcagcataatcgctgcaatgggatggtgacagaaccacaaatcggctattgtcatggttacagttgtgcaaaatgtaaactgtacccattccctggagagaaactgtgaccctgctcgatgaaaccccggatacccgttacctgcagctggcggatacgctggccgaggccattcgccgcggcacgctgcagcccggcgaccgcttgccttcggtgcggcgctgtgcgcaaacccatcgcgtcagcatcaataccgtggtgtcggcttaccgcacgctggaggatcgcgggctgatcgaagcgcggccgcagtcggggttttatgtccgcagcacgctgccggcgctgaagatggcctcggcgcccagcggccgcatcgaaccgccggcggacgacgtgctggcgttgatcgatacggtgttcgccgcccagcagaacccggccttcaccaacattgcgctggcctgcccgcagaccagcgatttctatcccggcggcaaactggggcgcatgctgtcttcccaactgcgccgccagccgggtctgatcggacaatatccgttgccgcccggcagcctgcggctgcgtcagcagatcgcccgccgctcgatgacgctgggcatgctgttggagccgggcgacgtggtgttgacccacggctgcatggaggcgctgcagctggcgctgcgcgttaccacccaaccgggcgactgcgtcgggctggagtcgccgacctacttttatctgctgccgctgctggccagcctggggctgaaagcgctggaaatccctaccgatccgcagctggggctgtcgttggacgcgctggagctgctgctgaacgagaagcggctgaatgcggtgatcgccatgccgacggtgcaaaacccgctgggttgcactatgccgctggccgcgaaaaagcggctggcgcggctgatgaacgatcatcaggtgccgttgattgaagacgggctgtatgccgagatccagttcggcggggcgctgtcgccggcggtgaaggcgttcgatcgcgacggctgggtgctgttttgctccagcttcaccaaaacgctggcgccggattttcgcgtcggctggatctgcggcggccgttttcacgaggcgttgcgcaagctgaaggcggtgtcgtcgatgtccgagtcgcagctgctgtcggaaacgctggcgaccttcctggagagcggcggctatgatcaccatttgcgcaacctgcgcaagcgctatgcggcgcaggtcgacgaggcgagggcgctgatcgcccggcatttcccgcgcggcacgctggccacgcagccggcgggcggcttcgtgttctgggtcgaattcccccccggcgtggacagcgtggcgctgttccatcagctgcttgaggagcagatctgtttgacgccgggcaccctgtattccccgagcgggcgctaccgcaacgcgctgcggctctcctgctgctacccgttcaacgcgcgctacacccaggcgctggctcggctcggcgccagggcctgcgagatgagcggcctgccgcccggcattgcgcaggacgggtaacggcgcgcgccttttgctacaatgccggtatcattgattagcgtgccattttgggcacaatgggccagagaccatgaaagagaaagaaaaggcagagatcaagcgcctgagcgacctgctggacgccttgaaccacaaagacgccaccgtgatccaacagggcaaccctgacttgatcgcgcagcacaccaaagagaaagagaagctggcgacggagatcgagcgcctgaaaaacgtgcgcggcgagaagctgagcgccgaagcgcagaagctgagccagctgccgttcagccgcgagatcaccaagaaagagcaggccgatatgggcgcgctgaagaaaagcgcgcgcgggctgatcgtagtgcacccgatgaccgcgctgggccgcgagatgggcctgaaagcggtcaccggctacgccaagaaagcgttctgaatcccgggcgtcagaccttggtggtgaaatacgccttggtctgatagggcacggtgaccgtgtcctggccccgcagttcctcttcttccgccaccagttggcgcaaccgatcgataacctgctcctgttgcgcctgcggcagcgcggcgataaagctggttgaacgtacccggttgtagatcacgtcctccaccgccccccggtggccgagcataaacacctgctcctgcagcggttcaaagcctttgaacgggaagaatttgcgccattcgccggtatagaaacgcggcgcatcgccttcatggctatcgacgatctgattcagtttacgcacccaaccgacgcgcgcatcgcgcatgttccacaccaggctgagtttgccgccgggcttgagaatgcgctggatttccgccagcgcctgcggcgtggcgaaccaatggaaggactgggcgcacaccacggcatccaccgactcgtccggtagcgggatcgcgtcggcggtgcccgccagcgttttcacctgcggcagcgccgccgacagtttttccagcatttgcggcaccggttcgacggcgatcacctgcgcgccggtttccagcaggcgcggggtgaacttgccggtaccggcgccgagatcgatgaccgtcatgccggcgtgcaggccgatgacgtcacgcagccagtcggcgatttccggcgggtaatccggccggcctttcacatagcgatcggcattggcctgatagccttcggcggcggcgtgatgaatcgaatgggtcggggtggtcatatacctggctcctggctgaaaaaacgtgcggctacagtataggcggaagaaaagggttaacgcggcattcggcgcacgtttttcattttccgctcgcgctttcaacggccgagcaggcggcggttgaaatcctcaaggcgcccttcggcgagccgcgtgagcatggtcttgctccagctggcggagaggccggccaccgccaacagacggcgatactgttccgcatcgaacggcatgtgccaggcgatggcgatggcttcggccaccgacacatcgctgttgcgcgccgccagcgccagcggacgatcgccgctgaccgcgcccggcgacaccacccgatacagccagccgcagcggccgctttgctgcatcagcaccgaaatgtcctcgatggcgaagtgataattgagcttgaagcacggcgagcgcggctgggtgacctggatcagcgcctcgccccagcggaagatgtcgcccataaacacattgtgttcggtcagcccttcggtggagatattctcgccgaaggccggggcgcaaaattgctcggcctgcgccggaaactgctcgcgccagtgggcataatgctcgcgcgggtagtgacacagcgcgcggtccggcccgccgtggtagcttttttcggcctgttcgtcgccttccagcccgagcggcgtgagccggatggcgccatccacctggcgtttggcgatggcgctggggcgcccgccttcatagggttggatgctgccgatgtaaacgtctgggtgatgcatgtgcgcctccgtgtctcgcgtcgagggctcagcatagcctgagttgttcccgtacactacccggcgtttacctgtacggaaggatgtgtttttcctgtctatatttaggcttttatcgtcgagaaaaaaccatgcgtttcattgtattgaggcatgcggagtcagaatggaaccgctcggggattattcaggggcgaagtgacagtccgctgacagaagaggggcgacgtcaaatcgctgggcttggcgctcgcttgcaaatgttatcggtcactttgttgatcagttcaccggctggccgggcttttacgacagcggagacgttggctgagagatgtggctgcactgtgcaaatggataagcgtttgcaggagcaagattttggccgactggaaggattatcttatgcgcaggccatgcgcgattatcctgaagcgacgcagtgcctctttgccggtaaggcagaggcgtcggctccgggaggggagaatgcttatgaggttgcctggcgcctgatggcttgtctgtccgatctggctgtcgatggacaaaatcaaacgcttggtgtggttacgcacggccatgctctgcaggcactgatttggtggcttaaaggggctgacccgcaggaggacctccgcagatacggtcatcgcaattgcggctacgcaatgcttgatgcgaccgcctctggttttaacttgttgaattggggagttgcgacccacctgttgccacaaagatagggcgaggaacggatattcctcgcctgatggcgtcagaaggtggtccagttctcttccgctgcggcgttggcggcggcgggttttacggccggcgctttcggcgcggcggctttcacggcggcgggttcggtctgctccgccaaacggaacaccgaaacgctctgcaacagcatgtcggcctgctcttccagcgaatcggcggcggcggcggactcttccaccagcgcggcgttctgctgagtggtatggtccatttcgacgatcgcctggccaatctgggcgatgccgcgcgtctgttcatcggaggcggcggcgatctcggccatgatgtcgcgcacgtgggtgaccgagcggacgatctgctccatggtattgccggtgctttccaccagttcggtgccggttttcacccggctgaccgattcggcgatcagcccttcgatctccttcgccgcttgggcgctgcggctcgccaggctgcgcacttcgctggcgaccaccgagaagccgcgtccctgttcgccggcgcgcgctgcttccaccgcggcgttgagcgccaggatgttggtctggaaggcaatgccgttgatcagggtagtaatttcggcgatacgctgcgaactgctggaaatatcgcgcatggtgctgaccacgttctccaccagcttgccgccctgttgcgcggtctgcgaggcgtcggtggccagctgattggcatgatgggcgttgtcggcgttctgtttcaccgtggcggtcagctgttccatgctggcggcggtttcctcgaccgccgccgcctgctgctcggtgcgggaagagagatcggtgttgccggcggcgatttccgcggaggcggtggagacctggctgacccccatctggatcttctcaatcatggtgcgcagattttggctcatcgccgccaccgcgttcagcaactgccccaactcatcgcggcgggtgctggtctgcgcctggcgcagatcgccgctggcgatgcgttccgccatcgccagcgtactttgcagcggacgggtgatctgcagcgtgatgcgccaggcgataagcactccggcgataatcgcgatcagggtggtgatgcccatctgcagctgcgccaggttgatgttgctgcgcgtctgcgccaattcgtcctgcataaaggcgttcaccagcgtgccgatcgcttgtgcgcgttcaccgagctgtcggctgatctgctgctcgtgctcataggccggcaggtaggccgcgatacggtttttgtaatcgtccagggcggccagcagcggctgcagctgcgggcgctgcgcgtcgctgacccggcggctcaaggcgttggccgcgtcgcgcgcgtcgtcgatggccgccatcagcggcgcttcggtttccttgttcaggctcagcagcagaccgcgcgcgccgtagcgcacctgggtcagcttctggttcagctggatgaaggccaactgcagatcgccgttggtgagctggcgctccacctggctcaggctggcctgcacttccgacatgttccagctctggcgcacggcgtctttcgccgagaccgcctgctcaaagattttttgctgttgctgatattccccaatcagtgtcaccagacgctgcagatccttgcggctttgggcgtcccaatccagcgcctgcccctgatctatcagtttgacggcgttttcaatattggcgcggttgttctgcagatactccggctggtaggtctggccgtacatggcgcggttgtatttggcctggttgatctcctcgttcagccggttgctgaagtcgatgcgatcggcgcgggattcgatgatgtgcagatattgcgctccggtgccggcgatgacgaccgccaacagcagcaacagcgcgaagccgaggccgagctttttacctacggtgagatgggtgaactttcctgccaatgcttgcaatgccgccatagcgtttttccttctccgggcgaacgtcaattgaacaaaccatcggcaggaagtggtcaaactttagcggatttcaggcaaaaaaatacccgccggcggcgggcatcttcatcaacaggggcgaattacttcttcgcggcgaagcgcgcggcggcttcgtcccagttgaccacgttccagaacgccttgatgtagtcaggacgtttgttctgatatttcaggtagtaagcgtgttcccacacgtccaggccgatgattgggaaaccggaagcgccggcgacggcttcgcccatcagcgggctgtcctggttggcggtagacactacggccagcttgccgtctttcagcaccagccaggcccaaccggaaccgaagcgggtggctgcggctttctcgaactcttcctggaatttctcaacgctgccgaaatcgcgctcgatggccgctttcagatcgccgcccagcgtggtgccggttttcaggtttttccagaagaagctgtggttggcgtggccgccggcgttgttacgcatgaaggtgcgtttgtcggcaggcactttatccagatcctggatcagctcttcaacgctgtatttggccagctcagggtaggcttccagcacggtgttggcgttgttgacgtaggtctggtggtgtttggtgtgatggatttccatcgtctgcttgtcgaaatgcggttccagtgcgtcgtaagcgtaaggcagggatggcagtgaataactcataatcatcatctccagtggtgtatgggcggcgcaaagggcgagcaccgcgtaagcagtcggatcattatagttaattaaatgatattgaaaatgattatcaatgccctgtgaactgtgtggttaatgaacaaatcgttgcgttaacatgctgatagaagagggcgctggggtgccgcgtcgaaccgccgccccggcgcgttggttactctctatactgtagggagcgccaacgccgaaatgtatcgaaatgtgccaatgcgttcactgaatgagcacgagtgtgtaacaaccacaagcacgctgtggtaatatggccggcgttcgtagcaagcataacaacagtgacattcgcgtttgccgcgctagcgggcaggcgcatttgaacaatgtgacaatcgagagtaaaggagacccccatgcaggtcagcagaaggcagttctttaagatctgcgctggcggtatggcaggaacgacggtggccgcgctgggctttgcccccgaagtggcgttggcggaaacccggcagtacaaactgctgcgcgcccgcgagacccgtaatacctgtacgtattgttccgtcggctgtgggctgttgatgtacagccttggtgatggcgccaaaaacgccaaagaaagcattttccatatcgaaggggatccggatcacccggtaaaccgcggcgcgctttgcccgaaaggcgccggcctggttgacttcatccacagcgaaagccgcctcaagtacccggaataccgggcgccagggtcggacaaatggcagcgcatcagctgggacgacgcctttacccgcatcgccaagctggtgaaggaagaccgtgacgccaacttcatcaaaaccaacgaccagggcgttaccgtcaaccgctggctgaccaccggcatgctgtgcgcctcggccgccagcaacgaaaccggttttctgtcgcaaaaatttagtcgcgctctcggcatgcttgccgtagacaaccaggcgcgtgtctgacacggaccaacggtagcaagtcttgctccaacatttggtcgcggtgcgatgaccaaccactgggttgatatcaagaacgcgaatttgattatcgtcatgggcggtaatgcggcggaagcgcatccggtggggttccgctgggcgatggaagccaaaatacacaacaatgccaagctgatcgtgatcgatccgcgctttacccgaaccgcatcggtggcggacttctacacgccgatccgctccgggaccgacatcgctttcctgtcgggcgtgttgctgtatctgatgaccaacaacaagttcaaccgcgaatacgtcgaggcctacaccaacgccagcctgctggtgcgggaagactttgccttcgaagacggcttgttcagcggctacgacgcggaaaaccgcaagtacgacaaaaccacctggaactaccagttcgacgagaacggcttcgccaagcgcgacgtcacgctgcaggatccgcgctgcgtgtggaacctgctgaagcagcacgtgagccgctacacgcctgacgtggtgagcaacatctgcggcacgccgaaggacgatttcctcaaggtgtgcgaatacatcgccgaaacctgcgtggcggataagaccgcttcgttcctgtacgccctgggctggactcagcactcggtcggcgcacagaacatccgcaccatggcgatgatccagctgctgctcggcaacatgggcatggcgggcggcggcgtcaacgcgctgcgtggccactccaacatccagggtctgaccgatctcggcctgctgtcgcagagcctgccgggctacctgacgctgccgtcggagaaacagaccaatctcgagacctacctgaaggctaacacgccgaaggcgctgctgccgggccaggtgaactactggggcaactacccgaaattcttcgtcagcatgatgaagaccttctacggcgacaaggcgcagaaggacaacagctggggctttgactggttgccgaagtgggacaaaggctacgacgtgctgcagtacttcgagatgatggcgcagggcaaggtcaacggctacttctgccagggctttaacccggtggcgtcgttcccgaacaaaaacaaggtggtggcttcactgtccaagctgaagttcctggtgaccatcgatccgttgaacaccgagacctccaacttctggcagaaccacggcgagttcaacgaagtggatccgtcgcagatccagaccgaagtgttccgcctgccgtccacctgcttcgccgaagagaacggctcgatcgtcaactccggccgctggctgcagtggcactggaaaggcgcggacgccccgggtgaagcgctgaacgacggcgagatcctggcgggcatcttcagccgcctgcgcgagatgtatgcgcgcgacggtggcgcggtgcctgagcaggtgctgaacatgacctgggactacctgacgccggacaacccggcgccggaagaggtggcgcaggagaacaacggcaaggcgctggcggatctgctggatgccgacggcaaagtgctggtgaaaaaaggcgaactgctcagctcgttcgcgcaattgcgcgacgacggcaccaccgccagcggctgctggatcttcgccggcagctggacgccggccggcaaccagatggcgcgacgcgacaacgccgatccgtccggcctcggcaatacgctgggctgggcctgggcatggccgctcaaccgccgcattctgtacaaccgtgcctcggcggatccgcagggcaaaccgtgggatccgaaacgccagctgttggagtggaacggcgccaagtgggtcggggccgatatcccggactacagcaccgccgcgccgggcagcgacgtcgggccgttcatcatgcagccggaaggcatgggccgcctgttcgccaccgacaagatggcggaagggccgttccctgaacactacgagccgttcgaaacgccgctcggcaccaacccgctgcacccgaacgtggtgtccaacccggcggcgcgcgtgttcaaggacgatctggcggcgatgggcaaatccgacaagttcccttacgtcggcaccacctatcgtctgaccgagcacttccactactggaccaagcacgcgcggctgaacgccatcgcccagccggaacagttcgtggaaatcggcgagaagctggcggagaagaaaggcatcaagcagggcgacaccgtgaaagtcagctccaaccgtggctacatcaaggccaaggcggtggtgaccaagcgtattcgcacgctgcaggtgcacggccaggaagtcgacaccatcggcatcccgatccactggggttacgaaggggtggcgaagaaaggctttatcgccaacacgctgacgccgttcgtcggcgacgccaatacgcaaacgccggagttcaaggcgttcctggtcaacgtggaaaaggtgtaacggagacgaattatggccatgcaatctcaagacatcattcgtaaatccgccaccaatggtttcacgccggcgccgcgcgcccgtgaccaccaggaagaagtggccaaactgatcgatgtcaccacctgtatcggctgcaaggcctgtcaggtggcctgttccgaatggaacgacatccgcgacgaagtggggcacaacgtcggggtgtacgataaccccgccgatctgaccgccaagtcgtggacggtgatgcgcttctccgaggtggaggaaaacggcaagctggaatggctgatccgcaaggatggctgcatgcactgcgccgatccgggctgcctgaaggcctgcccgtcggaaggcgcgatcattcagtacgccaacggcatcgtcgacttccagtccgagcactgcatcggctgcggctactgcatcgccggctgcccgttcgacgtgccgcgcatgaacaaggacgacaaccgggtgtacaagtgcaccctgtgcgtcgaccgcgtggacgtcggccaggaaccggcctgcgtgaaaacctgcccgaccggcgcgattcacttcggcaccaaggaagcgatgaagcaggtggcggcggatcgcgtcagcgagctgaatacccgcggctaccagaacgccggtctgtacgatccggcgggggtgggcggcacgcacgtgatgtacgtgttgcaccacgccgacaaaccgcagctgtaccacggtttgccggacaacccgagcatcagcccggcggtgaccttctggaagggcgtgtggaaacccctggcggccatcggctttgccgccaccttcgcggccagcgtgttccactatgtcggcgtcgggcctaaccgcgtcgaagatgaggacgagcacgacgagtcgcacgacgaggagacgcgcaaatgagaaaggaaaagcccattcagcgttacagcgcgccggagcgcatcaaccactggatcgtggcgttctgcttcgtgttcgccgccatcagcgggctggggttcttcttcccctccttcaactggctgatgaacatcttcgggacgccgcagctggcgcgcattctgcacccgtttgtcggggtgatcatgttcgccgcgttcctgctgatgttcctgcgctactggaagcacaacctgatcaaccgggaagatatcgtctgggccaagaacatccacaaaatcgccatgaacgaggaagtgggtgataccgggcgctataatttcggccagaagtgcgtgttctgggcggcgattatcagcctggtgctgctgctggccagcggcgtggtgatctggcggccgtattttgcgccgtcgttctccattccgctgatccgcatcgcgctgctggtgcattcgctggccgcggtcggccttatcatcgtgattatggtgcacatttacgccgcattgtgggtaaaaggcaccattaccgcgatggtggaaggctgggtgccggcggcctgggccaagaaacatcatccgcgctggtaccgtgaggtccgcgagaaacgacaggaagataaaccctgatgagtatccgcatcgttcctaaagagcagttaggggcacagcgtgagaagtccacaacggcggagaacatcccgccgttacttttcgccaacctgaaaagcctgtacagccgccgcgccgaacgtctgcgtcagctggcggtcgacaacccgctgggtgactacctgaactttgccgccgagctggcgcaggcgcagcagcatgcgctgcacgataacccgctggcgctcgatcttagcgaagcgttggcgcagggcgccgccagcggcaaaccgccgctcgatctgagcgtgttcccgcgcagcgagcactggcgcaagctgttgacatcactgatcgccgagctgcgcccgcaggcgccggagcacattctggcggtgctggacaacctggagaaggcctcagcgcacgagctggagctgatggccgacgccttgctcaaccgcgagtttggcaaggtgggcagcgagaaggcgccgttcctctgggccgcgctgtcgctctattgggcgcagatggccagcctgatccccggcaaggcgcgcgccgaatacggcgagcagcgccagttctgcccggtgtgcggcagcatcccggtctccagcatggtgcacatcggcaccgtcaacggcctgcgctacctgcactgcaacctgtgcgaaagcgaatggcacgtggtgcgggtgaagtgcagcaactgcgagcagactcgcgatctcaactactggtcgctggacagcgagcaggcggcggtgaaggcggagagctgcggcgactgcggcacttacctgaagatcctctatcaggaaaaagacccgcaggtcgaagcggtggccgacgatctggcttcgctggtgctggatgcccgtatggaagaagaaggcttcggccgcagcagcatcaatccgttcctgttcccggcggagtaaccgcccggccccgttcgcgcggggccggatgagcaatttcagaacgggcttctggcaatcgcccgggcgagttgctacgtttaggccataacgcgccaagcgaaaggaaccacgatgttaaacaccctggcaaaactgaccgcggtcgccgtgttggcggttggactggcggcctgcgacaacaaagacgacaccaaaccggcggtgccgccgccggacaccaagccgaccgtgacgcagcccgcgccaccgccgccgcctgcgccggtagaaaccccgcccgcgccgccggggctgaacgtgtcgctgcagaagggcaagatcaccttcgagctgccgccgggctttagcgatcaaacgctgaacagcggcatcatcaacgacagcacctccaccattcagcgcttccttgacggcaagtcgcgccagagcgcggtctcgtccgaagtgatcccgccggacggcatgaagctcaacaccagcgacaaaatgctgaaagagctgacgcagagcgccatcacggtgctggccgaacgctatcagaatatccagaccaccaaagaagagaacttcagcgtcggcaaacagaagtttcgccgggtggataccgaacagaccgtcaacgggcaaaaggtggtctccaccctggtgttgacggtgttcaacaagcgggtggtgacgttgcaaatgctgtcgccggccaaaacgccggaagtgcatcaggcgctggtgcagcggattatcgataccctggcggtgaagtaaggacgccgcagccaggacgaagcggaggagaccggatgaagcttatcggcagttacaccagcccctttgtgcgcaagatttccgtgatgctgctggagaagggaattgcgttcgaattcgtcaacgatccgccgtatgagcccggcagccgggtgaaggagttgaacccgctcgccaaggtgccggtgctgatcgccgatgacggcgaggtgttttacgactcgccgatcgtggccgaatacctcgagctgctggcggtggagccggcgtttttgccggccgaacgcgccgccgcgttgcgcgtccggcaggtggcggcgttggcggacggcgtgaccgaagcggcgacgacgctgttccgtgaaagccggcgcgcgccggaaaaacaggacgaaaactggatgctgcgccagcgtgacaagctgacgcagggcctggacgccctggaggcgctggcgcgggaaaaaacgtggctcaatgccgagcggctgacgctggcggatatcgccaccggctgcgcgctgggctacctcaattttcgccgcatcctgcccaactggtgcgtcgaacgcccggcgctggtcaaactggccgaacgcctgttcgcccgcgaaagtttcgcccgcacggcgccgccctgagctttcctttctccccgccgcggcggggttttgctatgccgatacgtttaaactgaaaaccgagcgaccatgagcactgaatcccaccttctttacagccaactgcccgctatcgaccgcctgctgcgtgaacccgcgattgaaccgctggtggcgcagcatggccagacgctgatcggcgaactgctgcgccggctgcaggcccaggcgcgcgacgcgatcaaacaacggcaacgcttgccggcctggtgcggcgactggccgcaggcgctgcgggacgagctggcccggcagcaacgcccggctttgttgccggtgttcaacctcagcggcaccgtgctgcacaccaacctcgggcgcgccctgctggcgcagccggtgaaggatgcggtgaacgcggtgatgggggaggcggtgacgctggagtacgatctggacggcgccgggcgcggccatcgcgatcgggcggtggcgagtctgctgtgccggctgaccggcgcggaagacgcctgcatcgtcaataacaacgcggcggcggtgctgctgatgctggcggcgatcgcccccggcaaagaggtggtggtgtcgcgcggcgagctggtggaaatcggcggcgcgttccgcattcccgacgtgatgcgccaggccggctgtcaattggtcgaggtcggcaccaccaaccgcacccatctgaaggattaccgccaggccatcaacgagcagactggcttgttaatgaaagtgcacaccagcaactacagcattcagggctttaccgcggcggtcgacgaggccgaactggcgcagctcggggccgaacagggcgtgccgaccgccaccgatctgggcagcggctcgctgatcgatatggcgcagtacggcctgcccgccgaaccgatgccgcagcggctgctggccgccggcgtcgatctggtgacgttctccggcgataagctgctgggcggcccgcaggctggcatcatcgtcggcaaaaaggcgctgatcgcgcgtttgcagcagcacccgctcaaacgcgcgctgcgcgtcggcaagctgacgctggcggccctggaggccacgctgcggctttatttgcagccggaaaaactggctgagcaactgccgacgctgcggctgctgactcgcccgcagcaggagatgcaacagacggccgagcggctgctgacggcgctgacgccacggttcaccgccgatttcgacctgcgcgccgaaccgtgctggtcgcagatcggcagcggttcgctgccggtggatcgcctgcccagctatgccctgaccttcacgccgcgcgacggccgcggtgccacgctggaagcgctggccgaacgctggcgccgtctgccgcagccggtgatcggccgcctcggcgacggccggctgtggctggatctgcgctgtctggaacaggagggggcgctgatcgcagcgctgagcgcatcatgatcatcgccaccgccggccatgtcgatcatggcaaaaccaccctgctgcaggcgatctccgggatcaacgcggatcgcctgccggaagaaaagcgccgcggcatgaccatcgatctgggttacgcctactggccgcagccggacggccgggtgctgggctttatcgacgtgcccggccacgagaaattcctcgccaacatgctggcgggcgtcggtggcatcgatcatgcgttgctggtggtggcctgcgacgacggcgtgatggcgcaaacccgcgagcatctggcgatcctgcgcctgagcgggcgcccggcgctgacggtggcgctgaccaaggccgaccgggtggacgcggcgcgtgtcgatgaagtgcgcagccaggtgcgcgacgagctggcgggccagggctggcccgatgcgccgttgttcgtgaccgcggcggtggcgggcgagggcatcgaggcgctgcgcgcgcatttgctggcgttgtcgcccgctgaacatgcgctgacgcgccgttttcgcctggcggtagaccgcgcgttcagcgtcaaaggggcggggctggtggtgaccggcaccgcgctcggcggccgggtgaaggtgggggatacgctgtggctgaccggcgccgacgcgccggtgcgggtgcgcggcctgcatgcccagaatcagaccgtggagcaggcgcaggccgggcagcgcattgcgcttaacatcagcggcgatgtcgataaagagcgggtcgcgcgcggcgattggctgctggcgcagcgtccgcacgaagcggcggaacgcattctggtggcgctggagacggatcggccgatccgccattggcagccgctgcatctgcaccatgccgccagccacatcaccgggcgcatttcgttgctgaacgacgggctggcggaactgatcctcgatcgtccgctgtggttggcgcagaacgatcggctggtgctgcgcgatatcggcgcgcggcaaacgctgggcgcggctcgggtgctcaggctgaatgcgcccaagcgcggcaagcgtcagccggactatctggcatggctgcaggccctggcgctggcgcaggacgatgcgcaggcgctggcgcttgaattgccgcacggcgcgctgtcactggcggcgttcgcctgggcgcgtcaattgacggacgatggcttggacgagctgctggcgaaccgcgatctgctgatcgtcggtgaccgggcgctggcgcaggatcaggtgcaacaggcggaaagccgcctgctgcaggtgctggcggagtatcaccaacagcacgccgatcagctgggcttagggcgcgcccgcctgcggcgcatggcgctgccgcagcagcctgaagcattggtgtttatgatgatcgatcggctgctgcgggccggcgcgctgcgcaatacgcgcggctggctgcacctgccggaacacggcctggcgttcagcgccgaagaggcgccgctgtgggcgcgcatcgaaccgctgttcggcgacgaaccgtggtgggtgcgcgatctggcgagcgaattgggcgaggaagagagccgggtgcgcgcgctgctgcgcaaggcggctcagttgggccatgtgacggcggtggtggtggatcgctattacctcagccgacgcatcgatcagttcgcggcgctgatccgcgagctggatgcggagcgcgggggcgccaacgccgccgatttccgcgatcggctcggcgtcgggcgcaagctggcgatccaggtgctggagttcttcgatcgcagcggctttacccgccgcaagggcaacgagcatctgctgcgcgacggcgggttgttcggtagcgagtcccctacccgataaacctgacggcggcccggctgacgtcgggcgtttgggcggtgagaaacgcctgtaaacgttcgatcagcggccgttttgccgattcttccggccataccagatagtaaccgtcgccggtgcgcacggcgacgtcacaaggcagcaccaataatccctcctcaatcgtccgcaggctcagcgccagatcgccgatcgagacgccgtgcccggcaatggctgccgcgttgccctgttccagcgaatcaaatacctggccgcgcatgagatcgatcggggccgcgatgccgcttttctgcagccagcgccgccagtcgcgccgatcgggcgacgggtggatcagcgggcaggcggcgagatcccgctgcccgtcggcgagcagcgcgggggcgcaaatcgggatcagccattcgtcgaacagcttggcggcggcggtattggcgccaaaatggccgttgccgagcaggatggcgcagtcgtagggttcgctgaaaaaatccacgctgtcgatgtccatccagacgctggctgcctgcacctcgaacgcctgcgccgtttgccggaaccggctcaggcagtccagcagccagcgcagggtcagggtggagggcgccttcagccgcagcagatcgcggtggcttctgaacagctcgcaggcttgctcgatgcggccaaacccttgctgcagctcggcggcgaagattttcccctgcggcgtgacctcgatacgcgggccgttgcgctggaacagccggcagccgaagtgctgctccagcgttttgatgtgcttgctgaccgcgctcggggtgagatgcagctcctcggcggccagcgtgaacgagccggtgcgggcggcgctttcgaaggcgcgcagggcgtaaagcggcggaagggaactggccatcgcggcgtctctaataatgagtctgattcacagtaaacgacaggattactcctttttcaaggcgggggcggcggcatgataatggcgcgacgccaactgactgaatgtgagtgaaataaagatgaacctgtcgttgctggcggcgtatttcgccgccattttgttgctgatcgccacgccggggccggtggtggtgatggtggccaacaccgcggcgcgctttggcgcccggcgtgcgctgttgaccgcgctgggcagcaacggagcctccttgttgctgatcggcgtcgccgcgctgattatcaccgggctgttcgccgtggatatgcgcttgctgcagtggataggcctgctgggttgcctgtttattggccgtatggcgatcgtctcgctgtatgaggatttatccgcgcgagcccccgatgcgcagcccgttgcgccgccgcaaaaacgctcggcgatcctgaacggttttctggtgggcatcgccaaccccaaagacattatcttcttcgtcgcctttttcccgcagttcatcgccgtcaccccctcgatcggcgccagcctgacgctgctgaccgcgctgtgggtgctggcggacttcgccattttgctgacctatatcaccctgctgtcgggaacggcgctgcagcgcgcgcggcgggcgatctctgtcctgtcggcgttgctgttgttggcggtggcggtggtgggaacggggtatgcactgtgggggttgctcggctgaagccgcataaaaaacgccggtcgggaaaccggaccggcgttttatcgtcgcgtttacgccgcgccgttcggctgcggcgtggggtcgccgttgcggcgtttgccgaggaacagcgccaccagcgtcagccagcacaggccgctgatgaggttgaacaggttgaacagcccgctgccgccccagacgtaggcgaccttggccagctcgatgccgacggtgaataccatcatgctcagcatgcccatagtggccgacaccgtgcccttgctgacgttgctggagaacagcgtcaggcggtacagcccggcgttggccaggccaatgccgaaggcgtacagactcaggccggcggtcatccacaggtaggcgtggctggagaactgggtcgccagcgcggcgatcagcagccctagcagcatcgggcccgcgcccagcttgatcaggcgctccacgctgttcttgccggtcaggcgcgccagcgtcaggttgccgaggatcagcgcgccgaacaccgggatctgcagcaggccgtagtccaacgtcgacagcgactcgccgctgatcaggatcaccggcgactgggcgatccaggccagcagcggcaggctggcgaaaccgatcgccagggcgccgcacaggaagcggcggttgcccagcacctggcggtagtcgcgccacaggttggcggcggaaaacgcctcgccctgcagcgtggcggtttccggcatcgctttccacaggccgtagaaggcgatggccgccagcgccgcaaacagcacaaacatgctctgccacggcgcgacgtggatcaacgccgcaccggccagcggcccgagcagcggggcgatcagcgccacgttagccatcagggcggtgattttgatgcacaccgcctcctcgaacgactcctggatggtggcgtagccgaccgcgccgataaagcacaggccgatgccctgcaggaaacgcatggcgataaactgctcgatggtggtgaccagcaggatcgccaggcaggagacgatgaagaacgccaccccggccagcatcaccgggcgacggccgcgacgatccgacagcggcccgagcagccactgcaggaaaatgccgccggccagataggcggtcattgaggtgggcacccactcttcgccggcgttgaaatccgccacgacggccagcatgcccggctgaatcatatcgttgccgatataggtggcgaactcgaacagcaccagacaaagagggaataaaagcgcctgccggcccaaacgtgccgcaggtggtaatgtcgttttcatattattgtactgatagtaaaagagaaaaaggaactgccagggcgggaagcgcaaactgagcgagttgtggcggctattttgccgccaattgttcaccttcgcaatcataaggtgttgtttaagtgcattctgatatttcgcttttgggttgtcgcctaacgccgtgcccgataacctcttcttaacatatcaatatgacataagatcgggcgagcgtttgagcgagaaaatcggctggatagacaacctgcgggcgatggcgtgcatgatggtggtgatgatccacgccaccacctattacgtcaccaacggcgcggcgatagggttgcacaactgggacatcgccaacgtactgaactcgctgtcgcgcgtgtcggtgccgctgttctttatgatttccggctacctgttcttcggcgaaaagagcgccggccggcggcatttcacccgcatcatctgctgcattctgttctacagcgccatcgcgctgatctatatcgcggccttcaccaagatcggtttctggccgtcgctgcgcggcatcctgcaaaagccggtgttttaccacctgtggtttttctacgccatcgcggtgatttacctgctgtcgccgctgatcagcgttaaaccggtgtcgcgtcgctacctggccgccgcgttggtggtgttggcggcgatcgccaacccgaataccgacaagctggccttcggcaacgcgcacctgctgccggttaacctgtatatctacggcgataccttctactacctgctgtatgcgttggccgggcgggcgattggcatgatggaggcgcgcgggcgcgccgtgggctggttggcggcgtttggatttgcgctgtgcgtggcgctgatcgcgcgcggcaccaagcatcagctgttcatcaacggcaacttcgccgatacttactacatctacagcggcccgctggtgtttatggcggcggtggcgctgttggtgtgggtgaaacactgtttgccgcagccgatcggctggctgagcgtattttcccgccattcgctggcgatttacggttttcacgcccttatcgttaacgtgatgcgcagccggcacctggatttcaccggccacccgctgctggatatcttctgggtgttcggcgtggcgctggggggcagcctgctgctgtctgtcggcctgcagcggctggatacccgccggctggtgtcatagcggcgagcgctggcgctgctgggcgcggcgcagctgccgcccggaagaaaaaccggccgccagcgcggccttctccaacccatacccttgctgcaggcgctgttgcgccaccgccaaccgcagctgctcatgatattcccgtacgctgatgccgacgtggctgcgaaacagccgcgccagatggcggctgctgacgtgcgccttctccgccacctgcggcaccgaccagtcggcttccggctcggcggccatcacgtcctgcgcgcggtgcaccgccgggtgcaggtggttgcggtagcgcagccagggcgacagctgcggatcgtcgccggcgcggcggaaataaaccaccatgtcgcgtgcgacgtcgcgcgcccggccggagccgcagtggcggtgaaccagatgcagcgccaaatcgatgccggtggtgatgcccgcgctggtatagacgccgcggtcttcgacgaagatgcggttctctttcacctgcgccgccggcgcctgcaggcggatacgttcgatgacgtcgtggtgggtggtgcactgatagccgtcgagcagcccggcctgcgccgccagcagcgcgccggagcagatgcacaccagggtgatgcgctgccgctgcagatcgggccgcagcgtcgccagccagcggcgggcctgctcggcctcttcaccggcgaaatagcgctgcgaatcgccgacgcccggcagcaccagaatggcgccgtcttccaggcgttcgggcaacggctgcaggccgctcagcgtcatgccgatggagcagacgacctgcggcgccgggctgaggtaacgcaggctgaacgacccggcgaggcgcagggtttccgccgggccgctgacgtcgagcgacagcacgttgggcaaaagcagaaaatagacggcctgcggcatggttactcctgtgcgagttgcgccagcgcctcatccacgctggcgatgcgggcgaaacgatcgaccagtacggtttcagtatgccgcttcagctgcgcgggggtaaagacttcaccgtcgggatggcgcatcgggaaggtcagcatcgcctcggtgacgaaggtcacccgataaccgagatcggacgccacccgggtggtggtttcacagcactgttcggtgcggatgccggagatgatcaggtggttgatatcccgctcgcgcagccaggcgtcgaggccggattcggtcagcgcattgtgtacatgcttatgcacggtgatatccgcctggtgggtgaggaacggcaggcgctgcacgtggcctgaagccagcgagaacggcccctgcggcgagacgtgcagcacgtcgaccagcgccgcgccgcgttgctgacagcccgcgatcagacgggtcagcgcctgttgaaacgccggcagatcgtcctcctgccagaatggacggtgctggaatgattgctggacatcgatgatcaataacgcgctctgtgacattttcggccctccgccagtgtgtgtagcgaccatattgcgccgctcattactctggcagaaggccaaaaacggccatcatgatgacaacagcggaccgaccttaggctttgctcacctggccagccaccaggcgcccctgatggaaggtggcgctgcgcgccggcaggcgggcgaccgcctcggcggaacagctggcgttgaccagcacgaactcggcggcatcgccagctttcggccaggcgcgctggcccttctcgtccagcggcagcacgccgccggtggcgatggccatggcgcgtgacaggtgatactcgtcggaaccgcggtacagctgggcgtacagattggccttctccaggatgtcgccggtgccgaacggcgaccagtggtcgatcacgctgtcggtgccggtcatcacgaacacccctttctcactgagctgcggcagaggcatcatcaggccgccgatcggcaccgtggaggcgatggtgatctgctgcgccgccagtcgggtggcggtttccgccagttcgcccggcgtcagcgtggtcagggcgaaagcgtggctgatggtgaccttgccgcgcagcgccgggtttttctccacggtggcgatcatgtagttgatggcggcgaccccggccgggctggtttcatgcaggtggatatccacgcctttgccggtatcgagggcgatctggaacatggcgtccagcgatttctccatcgcgccgtcgacgttggtcggatcgagcccgccgacgtactgcacgcccatctgcatcgcttcgcgcatcagcgcatcgactttggagtgcagcaggccgtgctgcgggaaggcgacgatttcacagctgaagtccgcccggtggttttccagcgcgcgctgcaggtgctccaggcttttcaggccgctgaccggatcgatattgcagtggctgcgcgccacggtgctgcctttggactgcagcagggcgatcagattttccgcccgctgctgcgaggtgggcagcagtttcgggatcagcgtctgctccagcgcgatcatgtccatgatggttttgccctggcgcgggcgcggcgcttgccacgggccgctgtagaaggttttgtccaggtggatgtgcatatcgcgaaacgccggcagcagcagccggccctgcgcctgatagcggggcacgccggcgggcaacgcggcgttggcggcgtgaatggcggcgatcttgccgtctttgatctcaagcgtgtatagcgcggtgcgggtgccgatcaccgtgtcgccgtcgtattcaaagccgtcttccagccgcacctcgctcaggcagtagtggcgatcggtcagggtcatcggcgttggcgcacactgctcgccgccaggagacgcggcctgtgccacgccaccggtcaggccgatcaccgcgcaggcggtggtgagtttgccggtttggctgaggaaggctctgcggcccggttgttgagggttttccacgttcggttccttaatccagaggtgagggagtgaaaacatcccccaatttaggagaggaagcggccggttggcagcgacatttgccactggtgactattcgatttggtaatgaccggcgtgcgccggggcaaggattttcctggcttgctctttcgtagctttaatggctacatttgtagtcattaaagctacattgaggttagcgtgatgcacgaaccgatgctcgagctgctgttcagcgaataccgtagaaaagtgctaagcctgctgtttattgagcccgggcgagcgtttcacgtgcgggaaattgcgcggcgtaccgcaactcaggccgggactttacataaagagttgagcaggctggctgaggggggcattttgctcaggcagcggcagggcaaccaaatttgctatcaggccaacgctgattgcctgattttcccagagctggcggctattttccgcaaggcttgcgggccggcggagcgcttaaggcagacattggcagcgtttggcgcagctattgaacgggcctttatttttggttccgtcgccagtggcaaagcgacggcggccagtgatatcgatgtgttgatcgtcggtaaactgtcttttgcggatgtggttcaggcggtttacccgctgcaggaaacgctgggtcgggaaattaaccccaaactgtactcgccggaagagtggcgggcggctttggtcgagaactccgcgtttatacaggacattatgcagaaaccccaactttggattgcgggagacaaggatgacgctggacaatctggtcgggctgggactggaggtgataacgcctgacgcaggggcgattaaaaaattgctggccgccgccgcgcgcaaccgacgcgatgcggatatcactcagctcagcaatgagagccgtttcgacacggcatataaggcgatcatgcaaatggcgaatgccgctttacaagccaaggggtaccgtacgttgatcagcaaacccggtcatcaccagaccatgatccaaacgttgccgctcaccgtagggttgccgcgcgaggcaatgatctgcctggatgcattgcgaaaacagcgcaatgtggcggattactccggcgatttggtgacggacgcggcggtacaggcttgccttgagcagaccaaagcgctgtgggtacggattatcgactggctgcagcgtgaatccccgccgatagtggcgtaagcgatctcacttcaacccgcaaaacaccgccagtggcaccggcgattgctcgatggccgggaaggccaggctgtccagccacagcagcggttccggccgcgcggcgcgcggcggttgccggcggcgctgcttcaccaggatcagatccagctcttcacgcgcgtaggcgctgtgcagatcggcgctcaggccgctggcgacgtccagccgcaggtgcgggtgctcgcggctgaattccgccagcagctcggtggtgggcacggcgaaatcttccggcataccgatccgcagcacgccgtcgcgccagatgccggtcagcgcgtcgtgggcttcttcattcagcgcgatgatgcggcgcgcgtagctcaacaacttgacgccttcttcggtcagcagcacctgatgcgaggagcgttcaaacagcggcttgcccagcatctcttccagccggcgcacctgctggctgacggtggactgcgacaagaacacccgctctgcggcgcgggtgaagctgttgctgtcgcacacggcgacgaagctgagcagcagctgcggattgaacatcgggtagcgattcattttcccactgttggctattttattatttaatttcccaatactagcggcgttgcctacagtaacgcaacgctgcggcgatcgcgctgtgacgccgcactcttcatttcgcagtaccaggaatataccgtgttaaatcattctgttaattcaccttctccacgtcgctggctcaatcctttgttgctggcgctggtgttgatcggcctgaacatgcggccgctgttgacttcgatcggcccgttgctgccgacgttgcgccaggccaccgggctgagttttggcggcgcggcgctgctgaccacgctgccggtgctgatgatggggctgatggcgctggcgggcggcgccatcaaccgactgttcagcgaacgcagcgccgtggcgttgagcctgctggcgatcgggctgggcgcgctttggcgcgaactggcccccggcagcgtgcaactgttaatgagcgcggtgctgggcgggctcggcatcggggtgatccaggcggtgatgcccggcatcatcaagcatcacttccttaaaagcatggcgctggtggccgggctgtggtcggcggcgctgatgggcggcggcgggctgggtgcggcgatcaccccatggctgatgagtacggggcgcgactggcacagcgcgctggcctggtgggcgttgccggctctggtggcgctgctggcctggtggccggtcagccgcgggctgtctcgcctgggcgcggcgggcgaacaccgcggcccaagcctgctgcgcaaccggcgcgcctggctgctcggcgcctatttcggcctgatcaacggcggctataccagcctgatcgcctggctgccgccgtattacatgcagctcggctggcagccgcaggccagcggttcgctgctggcgctgatgaccttcggccaggtattgggcgcgctgctgctgccggcgctggcgcgcaatcatgaccggcggccgctgctgctgctggccttgatgatgcaactgatcggctttatcggcctgatttacctgccgcaaacgctgccgtggctgtgggtgttggtttccgggctggggctgggcggcgcgttcccgctgtgcctggtgctggcgctcgatcacctgcaccagccggcggcggcagggcggctggtggcctttatgcagggcgtcggcttcctgctggcgggcgtgacgccctacctctccggcctgctgcgtgactacagcggcggcttcgtgctggactggcagatccacgcgctgctggtggtagtgctgatcgccattacctggcgcttccacccgcacagctaccggcgggcgttcgccgaataatatttctgtcattgccgctccctatagtgacgttgcttttacttctgggcgataacaacgaaaagggacaatgacatgcacaacaccaaaacccggctggcgctgctggtcggctgcatggcgctgagcgccaacctgtgggccgaggcgcagccggtgcaggcgatgctggccgggcatgcgctgctgccggtaaaatccgccgttgccacaccgaaggatgcgccgagcgatctgcagcagagcggcaaatacaccagcggcaaacgcgtcaccgagctgggcagcgtggcgggcaaatccgccgatcgcctgaccgggatcggcctgccgatcaacggccagccgctgcagggccactccggcatcaaacacatgcccgacggcacctactgggtgctgaccgacaacggtttcggcagcaaggccaactccccggacgctatgctgtacctcaaccactacaagatcgatttcaaagacggcacggttgcgccgctgaagacagtgttcctgcacgatccggataaaaaggtgccgttccacatcatcaacgagagcaccgagcagcgctatctgaccggcagcgatttcgatccggaaagcttccagtttgccgacgatgccttgtggatcggtgaagagtttgggccttacctgatcaaggccgacctgaacggcaaagtgctggcggtgttcgacacccaggtggatggcaaagtagtgaaatcgccggacaacccgacgctgaccctgccgggcgcgccggacggcaagcagaacttccaggtggcgcgttccaagggctttgaaggcatggccgcctcgccggacggcagcaagctgtacccgctgctggaaggggcgttgtgggacggcgagcagttcgagaacgtcggcggcaaacgctacctgcgggtgctggagttcgacgtcaaacggcaggcctggaccggccgcagctggcagtacgtgctggaagacaaccagaacgccatcggcgacttcaacatgatcgacgccacccacgggctggtgatcgagcgcgacaacggcgaaggcacgccggacaaagcctgcgccgccggtgcgccgaccgacaactgcttcagccaggtagccaagttcaagcgagtgtataaaatcgctttctcggacgccaacgtcggcaaaccggtcgagaaactgggttatatcgacctgatgaacattcaggatccgaacaagctggcgcgcaagccgctgaacgacggcgtgctgaccttcccgttcttcaccatcgagaacgtggacgtggtggacgacaaccacatcatcgtcggcaacgacaacaacttcccgttctcctccagccgccagcctaatatggcggatgacaacgagttcatcctgctggacgtgaaggatttcctgaagtagcgctccccggccgccgaatcgccggcggccgccatttcccgcttagcgcagcgaacaaactgcgctataatcagcgccttgcttccctcttctccaaggaagatcctcgtccccggtggggcggccggacttcaaatccggttggggccgccagcggtcctgggcaggttcgactcctgtgatcttccgccaaagattgtccgggtagttcctgaaaagtccattaaaatgcataaaatcaatttgttatatggttttattgtccgctggtgtccgtgcgttaccgcctgaatccgagaaaaatgtgtataatggtgcgtataatgtttttatacacagaatccacttatacacatgctcctaactgacatacaaattcgacgttccaagccgcaggaaaagccctacaccctcaacgatggccaaggcctgtctctccttatcaacactgacgggagtaaaggttggcgttttcgctatcgctatgccggaaaagccaagctaatgtcctttggtacctaccctttggtaacgctggccgacgcgcgagaaaagcgcggagaggcccgtaagcaagttgctaatggcattgaccctgtagccgagaaaaaggcgcaaaagctcgctcggaagctttctgttgagaattcctttgaagctattagccgcgagtggcacacgaacaaggctaaccggtggactctggcctacagggaagaaatcatgcgtacctttgagcaggatgtgtttccgtacattggtcaacgtccgattgcagaaattaagcccttggagctgctggaagtgctacggcgcattgagaagcgtggggcattggaaaagacccgtaaggtacgccagcgctgcggagaggtattccgctacgccattattaccggtagggcagaatataacccagccccagatctggccagcgcattagccgttcccaagcaaaagcatcacccgttcctttcggccgaggaactgccttattttgttaaggatttggagggatataccggcagcatcatcaccaagaatgcagcgaagatcgttatgctgaccggcgtccgcacgcaagaaatgcgctttgctacatgggaggaaattgattttgaacggggtatctgggagattcccgccgagcgcatgaaaatgcgccgcccgcacattgtaccgctctctactcaggcggttgaattgcttaaacagctacaaccgatcacaggtcactatccttacattttcattggacgaaacaatcgtaggaaacccataagcaaagaaagcgtgaatcaggtaatagagctgcttgggtataaggggcgagctaccggtcacggtttcaggcatacgatgtctactattttgcatgagcaagggtttgactctgcctggatagagatgcagcttgcccacgtggacaagaacggtattcgcggtacctacaaccatgcgcagtaccttgagaaacgccgtgtgatgctgcaatggtacgccgattttatctcgggccttgctcgctagaaaatgccgccaataaatcgttaaaaccccttggcgcgcaatgctacccccgcctcgcctgcgcgctttctgtgtcgcttttcatgcacccgcatgagagaccgcaggccgcgccagtactggctcggatggggatgaaatgtgcattttcttgcatgcaaaatcatgcaccctatgcatgcacgcgcaatttgtggctggctagccaggaaaaaggctgttttgggcgaggcggaaggggaatgccccgcgatgctgtcgagagcggcggggcggagtgtgattagtgcagggtaggattgctgttgtaacggcgatagcggttcaacgtccgtttctccggcggtggcaaggcgttctcatcgaccggttgcgcttgtatcggctggcacagaattttatcgacgctttccaccgtcttgaatgtgcaagaacaggtcaggctctgacattggtaatacgcctcctttgtccgctccgtgatatagcggctggtacgggtataggacgcatgggtgcacagcgggcaacgcatcatgattgggctcctttttcttgcagccgacggcgtttttccgccagttctcttgcccctcgcatctggcgcattgggcatctttgtcgctcctgcaatacgccggtttgttccggtatcgtcagaccaatctcattcagcaccgggtggtcgatatttttcgtagccatggtagcgcgaatgcggccttgtagcgtgcccagtacctgtagctcaatcattttcatcggattgtccgcatagacgccgtaagcccgtgaagccagtgcgcacgccttgataacgtcagggctgataagcgccttgctcattgcatccactgcctgatgcatcgcatgagccgcaaaggtcgtgagggcgtctttgtgtgcggccaccaccttcggggccgtgccgccgcagcggaggtgaagctgcattttgtccagctccatctcctcaatcaggccgtcgaactccttcgccagcccccgcttggaaatccggctgtggtgctgcgcttgcagttccggcgtcatttctccgcgcagtttgcggaacagggtgcgccactggctttcagtctcatggctctgcacttcggtgtctttcttctgttggtggcagcgggcaatgccggttacgacatcggtcaacgcctggtagtttttgtcgtgggcggcgcgagcgtcgcgcagggcttgcagtttatcggtgatggatttcggtaaagcggtggtgctcatggtcgtgtctccggtatcagtcaatgtgaagctattctgctgaccgccgtacaacatcgccattcatcccggttggactgtccccaggacaacagccttgagtactgatgagaaaaccatcaagccatttttagttttacctaaaactattcactactgttcacttaaataaaaaatataggtaaatcagtagataagagggtgaatagttctcgctaaactcttcacccggtgttcaccactattcacccggcccaaaacgcccttttccctggctagcggtgtttggcggtttttccctattaatcaaccgtccatccatcgctcaggcttttcggccggtttgccaacaaaggtcaataaaggccaatataggccaatatgtccacttgattgaaaagtaagcataaaatctgttccaccacacaacaacaccttgttgccaccccggtaaatattcacataatagggcgctaccgaagttcacacagtcccggccagcgttggccggacaccaagaggtagcgtttttatgttgaccgtttccacccccaccccatccactctgtcaccggtgcttcctggcggttacaccccgcgcgagcgctttattcgcctgccggaagtgctctacaccaccggcctgtcccgctccaccgtgtacgagatgatgagccgccggcagttcccggctcaggtctccctcggcggtaaaaacgtcgcctggctggcctccgaggtcgagcagtggatggacgagcgtatcgccaaccgtcaccaggaggccgccgcatgatgcgattaacctttggtcgccagcacattaccctgagcgacaacgacgcgctgtttatcgcggaagctatcctgttacaacgcaaagagcctggtgtcgtcttgccggagcaccgcagcgaaaagcacggcgtcattcgtctggcgagtagccgggccgagccgcgcctgttccatgccgggccggtgccgctgacctgcgcggcggccgatacccgcaacgaccaactgaccgactgttgatcactatgcgatcgattgaacgtccgggggcgtcttacggcttgcccccctgtccggccttgcgctatagtcctcccgctgccgcaaaatcggcagccgggcgtggaaacccgtgtaacttactggcgacacaacacgcgccaggcgtgttttttttcgtcgcagcctttgtgcgctcattttttgcgcggtggatgttatgctaccgcagcagtcaatcaatggtggctcaggcggggctgacttcggtcaggccggtttccagtaaggccggtatttccacccccgtctgggctaccacccataagcgtggaaacttcggtggtagcaataaccaatacttgctggaggctgccaccatggctacgaccctcaccccgactcacccgacattctgctttctgtttgcggccgtgcgccgttctgcgctgacggcgtcaccgcgtatggtgcgcaccgtggcggattctgagcacaacgcccgccgcctgctggcccgtgattacgtgttgtcctttgccggtcgtctgccggttaaggcggtggcatgaacaccctggccgaccgctactaccgcgacacccattaccctatcccgcatgccgattttctgcgtctccagcatgcgcacgccaccggcgtgctgttcctcgacctgctggatacgcttgacctcggcgggcagcgccccgatgccacgcaacaggcatcgtttgcctcggtcattgccttgctgaccgaccagcttggccacgtcgtcaacacctgtgaaacccaaatccttgcccgcatggaggccaccgccgcatgaacactgcatcctgtttaccgattgaagtccgtaccgccgttttccgccgcgccgtggcacaagcctatctggacacctgcgccttttaccgggtgagcctcgggtacacgctggacgagctgcagatgacgattgccctgcgtctggaagggcactttgtgcgtcagtacggcgcagaggatggcatggacatggcgtgcaccatgctgagtgatatggtgcagccggacgttctggtggccgcgccgcgcctgaccgcgctggggcaaaagatgatggacgagctgtgctgcgagcgcctgtcggcggcacagaacgccaccgtacactgaggagaaaaccatgagcgcccagttcgtttcccagaccgtacgtaccgccactggccactggccggtgatactcccggccctcggcattgccttgcagccaaacggcaagccgcagccgtgcccgacctgcggcggcaaagaccgcttccgcttcgacaatcaggacggacgcggcacctggttctgtaatcagtgcggggccggtgacggcctcaacctggtggaaaaggccctgtcactgtctgcccgggctgccgccgaacaggtggctgccgtgatgggggataatgccagcactttaccaccggccgctaaggccggtcattcaccacaagacaaggccgaggcccagcgcaaggccgcgcgacaggcacaggctctggtggctgccgctcagtcccagaccggcaacgcctatctgagcgccaaaggctggccggaggcagaaaccctgaccttgcaggggcaaccgctgcgcgttggcggtatcaccttccaccccggcgacctgctgttgccgctgcataatgccgagggtgaggtggtcaacgtgcagctgattaacgccaacggtgataaacgcatgctggcaggcgggcaggtgaaagccgcctgccacattctgaacggcccggacagcgcggttatctggctcaccgaaggctacgccaccggtctcaccgtgcaccgcctgaccggtgagacggtgtgcgtggcgctcagcgccaacaacctggcggccgtggcggagcaggtacgcagccactacccggacgcacggctgctgctggcggccgataatgaccgcagcggcaccgggcagacccgtgccgccgaggcggccgcactcaccggcggcactccggcgctaccgcccacggagggcgactggaacgacgtttatggccgggaaggggcagacgctacgcgtgcccagctccgggcgttcagccagccgccgcagcccagcccgttcgacacgctgagcgatgccgatttgaaagccatgagcgccagcgagaaagccgaactgctggccgagcactacggcaacaccctggcggtgccaccggtgggggaagagctgtgccgctatacgcgtggcgcctggcaggtgctgccgcaccggcagctgagccgggagattgccgcattgttccagaaggtgcgcgcaccgttctccgccgccggtatcaacagcattttggacaccctcaagctgatggttccgcagatgggcgacccggcccgccggttgataggctttcgtaacggagtgtttgataccgttagcgggcagttcagcgcccaccggcaagagcactggctgcgcaccgtcaacagcgtggactatacgccgccgcgtgccggggagaacctggccgaccatgcgccgcatttctggcagtggctgacgcgggccgccgggggcaaccacgataaacaggagcgcatcctcgcggcgctctttatggtactggccaaccgctatgactggcagctgttcctcgaagtgaccggccccggtggcagcggcaagagcgtgatggcggccatcgcccggttgctggccggtgccgacaataccacctctgccaccatcgataacctggagtcggcgcgcgagcgcgccagcgtggtcggcttctcactgatactcctgcccgaccaggaaaagtggagcggtgacggggcgggtatcaaggccatcaccggcggcgacgcggtcgccatcgacccgaaataccgcgacgcttacgccgcccatatcccggcggtgattttggcggtcaacaacaacccgatgcagttcagcgaccgcagcggcggggtctcccggcgacgagtgattattaccttcccgaacgcgataccgctgatcgagcgcgacccgcagttgctggacaaaatcacccaagagctggcagtcatcgtgcgccacctgatgcagcgcttcgccaacccgaacgaggcccgcacactgctccaggcgcagcaaagctcggacgaggcgctgaccatcaaacgccaggccgacccgctggttgacttctgcggttacctgacggtgctcggcaccccggaaggcatgatgataggcaatgccaacatcaccccgccgaatccgcgtcgctacctgtatcacgcctacctgtcgtttatggcggcacggggctatcagcacgtgatgaacctgacggcctttggtctcgcggtgccgcagacgctgagagagtatgagaaaactctgctcaaacgtaaaacccggctggggatgcagaccaatgtggtattgagtgaagagtgcgaagcggactggctgccgaagtgtggggcggtgtgacgatgagcaggacgatcggccgggccgatcaattgccctttattgatctgccgaatccattggacgctcaatcatcgcaccgcctatagtgacagtgaaaaatacgcaacaacaccagggcattaccccggccgcagagcggccggtatcataacgacaagcgctcccaaaccggctcaggccggttttttatatcctcgtttcgcccccctattgacgctgtactgaatcgcagggctgcccgacagtcagtcggatgagggaacggcgggaggcttaacgaccgcgccccgacgctgcccctgcgtcggcatcaccaccccccaggggtaggccggctgctgttctttctcatactgataaacaatgagccgcgccagattgcgattgtcataacggcggccgaaattgagcgcaatgctgctgggggcggccaaaatcacgtggatgcgttcggcgccacacgccgtcagcattttgacctgttcgataaattgcagcgccagccgggtttgtttcgacagcgaccagtgattaccgagcgttgtggcgttcagcgagagatgtgacagcgggtaggtggggaaagtttggcgtatggcggcaatgtcggcctggtaggacaccgagatcgccagcaccacatctttggccgctgaggtgacgaggctttccatcaggctaaaatcggcgcggtcatcatcggcattgttgtcaatcagccgccaggcctcttgcgctcggtcccagtcatagacgcagaccgggccgttgtcatcgagaatggcgccaatgtagaaggtgaacggaaccggcaattgcccgccatacaccagtgtcagatcctgatgatcgataccgtcaatgcgggtggcgatattgctggccagcgtgctgatattgtcgtcaaaggcctcttccgggtgactgattgcgccatcccgcatccgctgcgtcatatcgagggttaatgcgtctatctttccgttgaaatgacgaggtaccgttttatacagcggcgtggtcgcgactttccgcagcgctctcccttcgataaccaccacctttttgcgcaccgtgattttagcctcctggtaagcgtcgaccagcagccagacaaatccccccagaatgatgaatgccgccacgaaattgatgaaatagtccgtgatgacattcccctcggagacggccagcgagaagcgggcatcgcctttctccagcgttaacgccttccccagcgagttgttcacactcaggatcccggcgccaagcagcatgatgaggtattggattttccgctggcgcgttttccagtcgaccagctttatcagaatatattttgccgtttccatgtcagcgtttttcccttatgtgtgctttgatcttcaaaaacatctcggcctgatacagcgcgtcatccagcgcgttgtggctgccgtgatttttgagattaaattgggcgtcgatacggctggagcgggtgtcttgccagcggctgccggtggcccccatgtacagggctttgatatcgagggcggcaaagccaaacgggttatggccgagataaacgtgaaagtagtaattgatgaatgaccagtcgaaagccgcattgaaaccgacgaaaatcggtttactcgtggcgtcggtgaccgcggtgaccgcggtgacccagtgagcaaatcgctgcatggccgctttcggatcgatgccgcgggttatttgggtctgcagattgaaaccggtgacggccagcgcttcaggatcgtaatgcagattcagcggctgcacttcaatgtaaaagcgttccgccgggttgtcgatgacgcaggcgccaatagagagcaggctgcacacgccgggtatgggcccggcagtttcaatatcgaccgagataaagccttcatgttcaacgctcatttttaacctcgctggtgcgtgggtgcttgccgccgccttcccagtcgcgggtgcgcagccactgttcaaaataaaacagccagagcgacgcccagggaatgatcgtgtcgctgatttttaactgggcgcgccattcgctgagcccattgtcggcctgtgagccaggcaaaaacaggcacagcctggcgccgggaatatgcttatcggcgggatacaggtgcggaatagcccgcgtaccggccaacgcgaagagatccggttctgtcaccacgcaaatcggtggggtgagcaggctatatcggatcgcgaccttgtagcggcggctgaacagcgagggttgcagccatccttcccatagcagggtgcgatcgtgatggataatgcgcagccgttcatacgggctgccggctttcaacgcgtgatattgctgggcgagggtcagcggtttgcagtgatgcttgataaccacgttattcaccgtagaaggtgtttttaggcacgccggcctgggccgccgtgctggcgaggccggtggcgatcagcccgccggttttcttatcaagttgcaggctgccttgttctctggccgactgcatatgctccatcagacgttgcctgacgacatcgaccggctttttgccgaagccgtcttcgaggctcaggaacaggttgtcttcccccacgctggcggcgatggtgttaaacgtcgcctgggccgcggcatgccactggtaaaaggtttcactgcgctgaggcccctcatcctgctctgagcggttccacttctcggcgaagttttcctccggcatgtgcgggttgctgacctgtatttctccctgtatcgacacaatgaaatccggcatcagttccagcacgtctaacagaatatccaggtcgttgtcgtaggagcgcctgtcagcaatgatgtggttgtaggcatgacaagccagcgtggtgatgatgaccgaaatcgggcggcagcgctgccggacatcatcctgctcggcggcccattcgtcacggtggcgtttgagaatttgtacgatgcgattaagcaatttcttgtcggtgctgtccggcagcgggagcagcgcctcggtgcccacgcggctggcggaatccatgaccagaatggtgcgcaggggctgcacgctggcgctgctatcgaaccactcggcgtagccgctggggttggactccttccaggcggtgtgcgcatctacgacccacagcggctggcccggatgttgtgcgccggtgtgttcgcggcccggcgtgatatccagatgataatctccggcatagttgatacggaatccacggggtaaatcgcttagtagatctttataagtgttatgcgactccagtcgccggcgaatggccgatattacgccggtataatccgcctgggtggcatggggcagataacaaatcaggtcaatatcgtattgctcttcatttttgggcttaacggtggtgttgagccgcacgctgccctgcgggtaaataacggcatcttgcaatagcggatcgtcgccttcagacaggaaggtgccgaccccgttataggcgcttttgatgttggcgtattgggttttggtgagatccagcgtttcaataatttgcgataataaatcggcgatacgctgcttttttcctgccggcaggcttctggcggtagcggaaccgtacatagtatttccttatgctatgggggccgctgtactgcgggtgtgagaacgccacagcggccaataataaaaaggggtgaagcgatgggccgcaagcgggcccacacaccgtatcactcatgaaactcgggtgacgtcaggggcattccggcaggctgagcaggttattggggtgttcgccgtcattttgcgttttgaggtatttattccccgccgcgctggttgagataatcacccagacggaatggccatttgcggtgacccaaaagcgccaggtgcccgcctcgatcccggcaatggcgtctgcctggggcagtgaccagcgggtgccatcggcgttgacgccgccaatagcctgaatgcgctcatgcgcgttttggcgatcggattttctgatacaggtaacttgatggtccgacataacaactcctcggttagggaaatatttacgcataggcgtaagggaaaacagaaataatgggcccggatagccctttacataacctgggttgaaatcactgctataaatgtatagtcggctaatggtggtgcattcaatagccagtctattacgggtgctgaagtttctaattatctgtggcgttaatgatgttttttgccctcattaaagtcaacatcaataggatggttttcttgattcgttatcacataatttttataatttgaaaaaataattattataattcatatttatttcaataatatattgacggtgtctctactctgaatgcgtttatgttagtaatttaatttaatttaatttaatttttattaatcgcaatgctgggttttatctgtcattgataggttgcgcatcagcctgataaccctattaaactcatgagggatatcagggcgactggggttagggctgttttttagcctgagcgggtgggtatacctccgctatgcgcaaggtgtaaatcatggtggcgttgggggggactttaggtggatagcctttatctccgtaagcctgctcggggggaaccaccagggtcatcgtaccgtggtttttcagcagcgagatggcttctttaaacaacggtgggaaatccgccaccggctgcgacagtgtggcaccagtcgcttccatatcttgcaccacggtgccgtcgaccagcgtttcttttaccaccacatccaccgaggcggtagcggggatctgcgcatcgcccgcatagtcgatacggtaccaaaatccggatgatgcctggtgaacacgctgatctttcttgaattcccttagataggccgcacctttttgccgttgggttgcgctgatttcttctcttgcggataccacttttttctcggcggcggccagggtgttattgagttcatcatccgacaacatccgcttgcccgcaaaggcatctgcaatgccggccaatagcattcccttctccgctctcactccccaacgctgccgttcttcctgcatttgcagaatttcctctcccagtgaaatgcctgcggcgtaatcctcacgcggttgtgcgcctttgagctcatcggccgtcaccagacggggacttcgcgcttgcaaagaagccatgttggctcgcgtatctgccagtttcttaacggtttcatccagttcggtttgcatcagttgacgctgtgaccgccattcagcttgctgttcccgcagcaccacgtcgcgcttttccgcttccatcagcaaattcttttggtggttggctgccgccgataaggcctggttttccgacttagcttttgacaactgctgttgtaatgccgctcgatcctgataccactgttgccgtatctgtaagaggttggctttcgcctggcgttctgtcggggtcatgctcagcgactgacgcaagctctgcgccaattgtgatagcgcagcccaatccggcgttgccgttacggcgttttgctgcagacgggagagctgtaattttagctgggctatttccgtgcgctgttgctggatctccttatccttaattcgccaggattcgcgttgaggtggcggttttttatcagtcttacctttctcgacgctttgggttgggcgtttttctgtgcgagagctatccagtacggcaggggctttttcagccgggtagcttttttcgctgtattgctcggcaaactgcagcaaagccagaatatcggcattacccttgcttggcgccgatgaagccgctggtagcatcagccctcccgccagacaggccaaaaaacggtaggtaaaccgtttccagacgatcattttatcgcaccaccgcgtttcgccagttcggtaagtaacgcctgattaatctcggcgcattgatagctcacctgataacgatagagggcatcaacggtctcttgcgtgcgctcgttgacctgggtacgcacaccggcgtattgcgaagcgccggacatcaggttgtcgaacacctgtttttttgccgggtaatccgccgttttcagtgtccccagtgcgcttaaattctgttggcactgctttaaatcctgggtttcacgcttgaccttttcatcctgcaatgtgctggccgaagcggattttgtctggggcattttggtggactggcaactgctgaccaacagtacacacatcaataccgccgtgatggataggggtgaatggctcatgttcaaattccttttctcggttggtggcaggttaaaccgccttgcagcatccaatggaacagctcgttacttcgtttaaaattcaattttctcatcgccgctcgtttgtgcgagctgatggtcttttccttgatacccaggaagctggctacgcaggcaggtgtttttccctgcttgagttgatgcaacacttcgcgttctcgttgtgtgagcgctaagtgttgcaagttctccgaagtagattgtgtttttaccgatgtcttttgcagggaaagcatgacgttttccattagctgcaagagtaagcttaccgattggtgtcgataaaggatgttagatttattaacgctacggtataagtgctgcaaatgggtatcttttctgtcagcgatggcgacatacactggtttatcgttgttcatacagattgcgctgccaggcgcaatcaaagtgccgcaacgtattgcctgaaaaacgatatctgtcgtttttccgtaggcgagatgggaggaaaactctacttgctggccttggttttttaagtaaatggtcaatgccatcgctaatccggcggtataaaatttgtcatcgtcaatgatgacgatgttcagtgtcttattcatgatggcattttgcgtgcttttcatgttttgggttgcctgtgctctgagtattcatagtgccttggtcatcaatgtttttttgcatgtcgacggtcagctagggaactaatcgccacctggctgatgtgggtagtaaaagcgtgtttttggattgataaaactgtgttgtttgtgtggaggacaggctagcgaattaacgatgtgatacacaacttaattgttttcattgttttttattatggttttattctgtttttttattttttttagcgttttgttctttcctttttctgttattaatcggttggtgaggtggttaagtcatggtgatattcagtacgattaggggggaggtttaaccgcttgccaggcacgcgattaaacctttgtgagagttactgttctgttatagcgcagacaaaaattgggttatctaatcgcttgtagataactgagttttccttcaggtgttttgtttctagatagaaggaaacgcctggaacttctggtaatacgtaatgttgccagagtgtatcgggcacgttgtctttaggattgcgcttttcactcgtgattacagctacactataaccgtttatatccgccggtttatgtgtgacgaaaattgttctgtatatcgtgtaattttcacttttgtctttaagggagcctatcaccagaacttcactgtgctctttatgaagggtaatgacatttatattcgcgttaaacttaatccagttgccattctttgttgcaatactcgaattcacttgagtatcgcagcggaacggtttccagctaagactgtttaggtaaaagaaaaacagccctatgccaatgacgctaaaaatagatacccagacgattactctattcatgtcactttactcaaccagtttatagttattgcaagtttgatagctcatattggtgcttttggtacaaaccgccataaagtgaacctttagtttgtcattggcagggcgtgccccaatatagtagatgtctcgatttatctgcgcacagtctatctttgcatcggagagcatttctcgcgcatgatcaaactgttcactgcttggcttattgttacccagggcataaaaattgcatttatcctgaacgcctatgagcattggctcttcattactgtgcagagtcatcaactttatcgctgcagcaatggcgagtaaggcgaagataagagccaggccgggtttcagcatacgctgcagcgttcctctgaggcccgaatgtgtgggatgaggcgttaggttttgctgctttaccggctcactcgtggtaaccgcgggggcaaccatttcaacagatccatcttctttcggtggtttagtttcggggtggatttctgcatccattttaaaccccaccctcggcaccgtaagcagaatgtctttgcttaccccaagcgcttcaaaggcttttcttaactcactgatatggttgctcaaggtggcgctggacggagagaatccgtaatcctcccagacgtgcttgatcagcgtttcgcgcgtcagttcatttctattgtttttaactagctcgattaacaatcggttgcctggtttggataaccctatagtgagttggtcattattcctaagcattaacagccggttgtcaggatcgaaagtgatgattaaatttattatgtatttcatgatgatgtattttttctttctggtgtttgatcttaagattaactaaaggcaagaataatcttgttttaagatttataaaatttattggatggggggctgcccgtcaacttgtttttagagtggcgttttttattgcggatgtcgttgaaagccaagtggtgttattgtttaattatgcggctcaattcaggttaataatctatatgtgttgtgttttttgttttaatttggttttttaatctaatttttttaaattaaatagattatttatcttttttgtttttttgtgattactatattcaccagttgccggtagccataacgtagcaagttgacaggtgtatgttcacctttctttctctgtatgtttggtgccgaaataatggcgacttaacggaaatgtgacagaccttaattaaggataaagtagaaatgaaattgaataaaatcatgatggctgcagttttggcattcggtactgtttctggtgtgcaggccgccgatcaaggacatggtaaagtcaccttcaccggttctattattgatgcaccttgctctatcactcaagagtctattgatcagaccgttgagctggggcaaatctctaaggctgctttactcagtggcgggaaatctaccccacgtaatttctcgattggcctggagaactgcacgttcggctcacctgccaccaaaaataaggtgcaggtaacctttacgggtatggaatctgcggctaaaaatggcctgctggggattaccggcacggctaaaggcgccagcgtagctatcactcaggctgatggtgaaatcatcaaactgggcgagccaacgaaagagcaagtattgcaggacggtaacaacacgctgagtttcgctgcctacatgcagggcgataccgcttcttccgcgtctattactgaaggtgaattccaggcagtggccgattttacactggcttataactaaaagctcactccacataaagtaagtgttttctctgtatgtgtgtatatgcatgcggtatctccgcatgcctttttgacaatattacaaagtatggagcgcgttttatgagggcgaataataccgttattatagtggtttcttgcctgttttcctttccagtgctctctgttttagccggcgagcacattgccggatgggggcgggtaaatatgcaagggtccattatcgacaccgcttgtgctattgcggttaacagccgagaacaaaccattgatatgggggttttacccttatcggatattattcgcgatgggcagggtcgcagcaaacctttttccattgatttagtcaactgcatcactgaacgccctggaaaggaaggctggaagaaatttcaggttacttttgatggtgaagctcatggcgggttatttggtgttaacggggatgcctccggcgtggcgctgcaaatcatcgatacccagggtaatgtcgcaatgccgggcaaggctatgccgccagtggatattattcccggcgacagccaattgaattacgccatgagattggtagccaataatcatgcgttaaaagcaggtgattatttatcatctatccgatttaagttggactatttttaatttcttgctggaagagtgctgtttttcgcctcgcgtaatggatttatttatactaataaggtaatggcatggagttttcttcgcttggaaaaattgcacctctgcattcgttaggattgtttatttcccttgcgttgggtacttcagtgataagcgcccatgctgccgataatattctgttcaataccgatgtgctggatgtcaacgatcggaaaaacatcgatctgagccaattctcgcgcagtggctacattatgccggggacctacggcatggtggtgcacgttaataagaatgacttgccggagcaacagattgcattttatgcgccggagggcgacccaaatggcagtcgtgcctgcctcagccctgagttggtcgagcaactgggattcaagcccggcgtgctgaaagacctgacctggtggcgagagggagaatgtctgaacgagaccagcgtacagggaatggaagtgcgtggcgatttgcccacatcctctctttacctgagcattcctcaggcttatctggagtacagcgacgagaactgggatccgccgtctcgctgggatgagggtattccagggttgctcttcgattacaacgtcaatgcgcgtagccagcatcagcagcgggacggatcgcgcagttatagcctcagcggcaacggtacggcgggcgccaacctgggcgcatggcgtctgcgtgccgattggcaggcgaatcttgaccatcaaacggggagcgggcaaccgacccataaacagctggactggagccggtattacgcctatcgggcaataccggcgctgcgctcgaagctgatgctgggtgaaaactacctggactcaggcatgttcgacagcttccgttttacgggggcgagcctggtgtcggacgacagcatgctgccccctaatctgcgcggttatgcgccggaagtggtgggagtagcgaaaaccaacgccaaagtcaccatcagtcaacaagggcgtgtgctgtccgagaccacggtggcggccggaccattccgcattcaggacatcaacgatgcgatcagcggcgagctgaacgtgcgggtggaagagcaggacggtggcgtgcaggagttcgtggtgaataccgcgaacatcccgtacctgacgcggccaggctcggtacgcttcaagctggcgacgggtaaaccgtcagactggcagcaccattcgcgcggcccgctgttcggcaccggcgagttttcctggggggtgagcaacggatggtcgctgtacggcggtgcgctggcgggcggcgactacaacgcgttgtcactgggtatcggccgtgacctgatggcgttgggggcgctgtcgtttgatgccacccagtcgcgggcgcggttgccacaggaagacggcacgctcagcggcggttcctatcggctcagttactcaaagaacttcgacgaatacgacagccaggtgacctttgccggctatcgcttctcggaacaggactttatgagcatgagcgagtatctggacgcgcgttattacggcacccgaacggggaatggcaaggagatgtacaccattaccttcaacaagcacttccgcgactggggactgagtacctatctcaattacagccacgagacgtattgggaccggccggccaacgaccgttacaacctgacgctgtcgcgttatttcgacgtgggccggttccgcaacctgagcctgtcgctgtcggcgtaccgtaatgaatacaacgggacgaaagacgatggggcctacctttcactgtcgatgccgtggggggataactcaacggtgagctacaacaccacggtgaaccgcgacgacaccacacatcaggtggggtattacgaccgaattgatgagcacaacaactaccagttgcgggccggcagttcgcgcagcggggtgaatgtgaacgggtattacaaccatgaaggtgataaggcgcgcatgagtgctaacgccagttatcaggaaaaccgttacagcgccttcgggatgtcgatgcagggcggcatgacgatgacggcgaacggtggggcgctgcatcgggccgggatgccgggcggcacccgcatgctgattgacacgcagggggtggcggacgtgccggtgcggggctatggcagcaccaccaacaccaatgcctggggcaaggcggtcatcggggacgtgaacagctattaccgcaacagggcgagtatcgatgtgaacaaactcggtgataacgccgaagccacgaagtcggtggtgcaggccacgctcaccgaaggcgctatcggttaccgccagttcgacgtgattgccggcgagaaggcgatggcggtcatcaaattggccgacggcagtgaacccccattcggcgccacggtaatgaacgcccgcaagcaggagacgggtatcgtcaatgacggcggcagtgtttacctgagcggcattaacgccggcgatgccatgacggttcactggaacggcggcgcgcagtgtgaggtgcgaatgccaacgccgctgccggcagacatgctgatgaatacgctgctgttgccttgtcatccgctgggggcgcgcacagagcctgacgcgcggacgcagggtgtgccagtgccagtggttgcgccagagccggaaccggcttcgtaaccgctgcgccgagggataacacggcgtgcagatttaacccaaatgctatgagggccgctacggccgggaatgaaaacatgcgaaagagcgaattgaacatgaaacaacatcacgaaggccgcccggttgcgtccgtgcggaaaaaggccctgacgacggcggcagtggccggtgccctactcgcggccttgctggcccagcaggctcaggcagcgatagcgctggatcgcacgcggattattttcgatggtagccaaaaatcggtgagcctgagcgtcagcaaccaaaacaagcagctgccttatctggcgcagggctggattgaagacgacaagggcaacaaaatccagagccccctcacggtactgccgccggttcagcgcatcgagccgggcaaaccgagccaggtgaaaatccaggcgctgcccgtggcgaagacgctgccgcaggatcgcgagacggtctattacttcaacctgcgggaaatcccgccgaagagcaccaagccgaatacgctgcaaatcgcgctacaaacgcgcatcaagctgttctaccgcccggccgccattgcgatggacaaaaatgcgccgccgccgcaggagcaactgaccctgagcaagcagggcgacaagtatgtggtcaacaatccgacggcgtattacgtcacgttggttgatgccgccaccaaaaaagatggcgcggggatcaaaagcttcgaaccgatgatggtgccgccaaagggcaatttgccgttgacggtgagtgcggctgaggcaggtaacagcccggtgctgacctacgttaacgactacggcggccggccgcagctgagcttcagttgctccggcagcacatgcacggtgataccggcgaagaaagcgtagcagagcacggtctggcggtgcaggtaccggtcaagcgaagggagacaagaatatgggcatgacacacgagacgggcagacaccgacggggcctgtgcggagcgattgagctgaagtattacggcgtgttgttcgggttggtgctgatggccccgataacgctgggggcagtgatgtggttattgccaccggcgcaggcggcggtggacaactgggatgtcgaaggcgccaacggcaccttgtacgttcatggggcgttaaccgagagcgcctgtcggctggagatgaccagcgcccatcaggatgtcgcactcggtgagacgggggcggggcgcctgagaacggttggtgcgcgcggcgaaccgatccgattcgagctgcgtttggaggattgcctgcgcagcccggccggtagccgcgatgtgcgtaccggcggcctgagctgggcggacaaccagccgtcggtcacggtgagtttccgtgcggcgcgtgacgccgataacccgcagttgatgaaggcgcagggcgtttccgggctggggctgcgacttgaaaatgcgcagggggaagacgttcgcctgggcagcagggggaaaccgctgttgctgacgccggggcagaatacgctgagctacacgataaccccggaacgcactcccgccgctctgatggcgggcagctatcgggccgtggtggattttcatctgagctatgactgaggcggccgcaatgaatgggatcgtaacgctgcagcgaacgctggcgggggtgctggcggccttgccgatgctggcttgtgcagccccctcggccacggtcaccgtcaaggttaccgtggtggcgccaccgccctgcgtgataaacgatgaccgaccggttgaagtggagttcggtgatgtgatgaccacccgggtggatggcgataactacaagatgccggtcaattacacgctgtcgtgcaccgggggcactacgaatgcgatgaagctgcaggtcaaaggcaatggcgccgcgttcgacgcgacggtgttgcagaccaacaagaccgggcttggcatcgaactgcgccagggcgacggcaaactggccgtcaacagctggctgaatttcacctatccgaacaagcccgaactgtgggccgtgccggtaaaacaggccggcacaaccctgacgggcggcgagttcagcgcaggggccacaatggccgtggattaccagtaacgggagcggagcatgagcaaaacactaaagatcctgttgctggccgggggggtgacggtgggcatgacgccggtacaggccaaagacggtgaagccgacatgacgtttcacggcaccctgatcgagccgccgccctgcaccctcaacgacggcaatcaggtggaggtcgatttcggcgatcgggtgggcatcaataaggtggacggcgagaattaccggcaggggttgaactaccaaatcacctgtgacagcgccgccggcgggaactgggcgttgacgctcagcctgagcggcagtgcggcagggttcgacagtgaagccctgttgacggacaaagccagcctcggcattcgggtgtaccagaacgataaacccttcaccccgaacagcacggtgaagataaatctggccaacccgcctcggttggaggcggtaccgatcaaacaagcgggcgccacgttgaccgaaggggcctttgaggcctgggccacgctgcgtgccgattatgaataaggagcgcgacatgaaaggggaatcgggctggcgccaaccctcgggggatccacgttctcgggtgggtgccctgctgttggtgccgatgttgatggccgcaccgctatcggcgctggccgcgggtgacaataacctgtacctgcatggcgctctggtcgcagagccctgtgtgataccgccgggcgatgaagaaatcacgctggattttggcaccattatcgacaagtacctgtacctgaacacgcgcactctcgggcaagccttcgagatacatctggaggagtgcgacctgacgctgggcaagacggtgagcgtgacctttaccggcacggaaaatcaagccttgccgggcctgttggccatcgatggcggcagtgcggcgacggggattgccatcggatttgagacgccgtcggcccaaccgctgccgctcaatacccagagtggcaaatccctgttgcaggacgggggcaacaccattgcgctgagggcgtatgtgcaaggtgagcccctggcgatagccgaccagacgattggccggggcgcgttcagcgcggtcgccactttcaatctggaatatgagtaagcgacagcaaatcggcagtgacaaacatacagaaagaagacagcgccgcgcaggactgggataaggcgtatcgctggttgtgcctgcggcgacagcatgcgccaccgaatgcggatgtgtgggatttacgctttaagtggccacggcaaaagtatcaatggctaaaccgggtactggcaggggaataccagctgtcgccaatgcaggtttttcgacggcggaataaacgttgggtgcaatggtcggcgcatgatgcgttggtgctcaagtgggtggcgatgcaggtcgaagatcaattgcccaggaacgcgcattgccatcacctgagagggcacggtggcgtgagcggttcgacgcaatctgttgcttctgcctggcaaagtggggaatggcgttatatttaccgcacggatatccggggttattaccggcatgttttaaagcatcaggtggccggacaattgcattggcatatacaggatgcggtttgccgcaacctgtgcctgcaatggctctattacagcgtggaagacggcggtgagatccgtacccctgaaaaaggaatttgtcgcggcagtgcgctgagcccgatgattggcggcagcctattaaggcatgttgactcttattttgcgacgcgcgaggaactgttttatgcccgatatatggatgactttattttctttaccaaaacgcgctggcatttacgtaaaacgattaaatcgctgtatgaatttttcgatttgggcggttttgaaacccacccggataaaacacaactggggagaatggaaaatggctttgactggctgggggtatggtatgcccccgaagggccccggatagccccgagagcaatagagaaccatcgggaacatattgcgcggctttatgagcaagcacgtttgaggaaactgtcgaaggcagagaccgataaccgtgtgcgggaatatgaagcccggtggatgacatgggcaaaacaccatttgagaaaagtggggtgattgcctgttgattaaataaattacacgataggtatcgtctcatgagttggtacaccttctcgctcttgattctagttcaatcgttgagcaccgcggcgaacgctgttgcgtggccctacgttaataatccccggattatctcatgcacctctggcagccaaggcgaatgttcgaacaacgttttctacgatagtgatggtgtcgtattcattgacatcatgcccgtgggtcaacccgatccgtcgctaggaactaagattcgtgcggtgggtattcattgctactacgggaacagccttatcggtaacccctttgggggctgccactgggtccggcccttgccaggcacatttgccaggcacattccgatcgtgacgggtaagtgcgagctgaaaaacacaagctcgtgggagttaacgcctgactccacttgcgccaccgggggatgggacggtcacaacggcgcggggccgggtggcgagtgcgtgatcttcacccaggtaaagacttctaccgtgggcaccctcaatacgccttttggggtgctgcaccctgataccgtcgcgaactctggcaatcggttctgtcagaaggccctaccaccggccgttcggtgtgacctcgatctcccaactagtctcgaccacaagacgatgccccagcagggctcgggttccgtcacagtggttggttctatctcctgtggtgccaagcccgtggtggagatcgtgggaggggatgtagttgtcctaggcgctggtgtgaaaagccgtttgtctacgaacgttacgtctgcgacaacggtggcgttgacgtcgaagctgacagtgaccaacgccgctccgggggaatatcggggcgcggcggtcgtacgggtatccccatactaatggtaggataaccccgtcgccccgccgtaggggcggagtcgagggtgaaagacggattacagcctagggctggatggcgatccctcgttgaatgtctgtagtggagggatgtcgttgcggggaggccggcccctggatggggggtgtcccatggggaacgtgggtggtggcggcactccgtctcgttggctcctgcgagataaccgacgtcgtgctcgttgagggtaatacccgttcaaagtggtcatcgtacctactagactggacgggtagatcatattttccgccctagtcgaggaatcgtgccctgggcctaccatcacaaccgtaccagtggtgtaacgggcgcgggggggggggataatttatacgcgaagaatgtggctatgcgtaggtcacagttgcacgagcgacgtaacccacggtgggtacaaaaatagtgggtggcatgggcttttgttcaaatagtccgaaagtggttgattttattccctgtggcttgtttgctcgtattcgcaatggggtttatccatcgccgtgcatgttggaccgctatcgccgagggcgaccccgtggggcctagtaggccccgcctcataccgtggggctatatttgatttcatgcttatacacgaatatgtccgactgacgacctcccgaggaatgcctgtgcggactgcatcagccagtccaagaacggcgaagttctgggcattctgatgcactgcgatctcctcgtgaacaaatcccaaagctccctaaaagtgaacggtgatgcatagtctgaactaactattctctgtgtaatcacatgatttaaaataataaaatctagttatgactactgtgacgtgtttttcgataaatctttttatgtcagtgctgatttgtagaggttgagtaaaaattatatgtagtggtatttgtgtatatcatggtgtataaaataaaattttccaattaaaaacatattatatatcaattggatagtgtttctttgtcactcctgtgatcttccgccaaattactgtttccctcactttcttaaattcaacaaaatcctatccaagcgagtcaggttgcagacattttttggaaaataactgttgttcgagtaatgagctttgatgtggttctctggcatactgagcgaattacagcgttgtcagtcagattaaagcggaggagacatggcaaacaagcacttaacccaatcaccggtaggtgagtttgttatgtttgccagcgatgatggcgaagtgcgcgttgaatgtcgatttgagcaagaaacgcgagcgaccatcgcgtttctttatcaagtgactccccaggcgattacgcaacatatcaaagcgatctgcgaagaagctgaacttgaacaaaacgcaacctgtaagtcttacttacaggttcaatagaaggggaaacgccagataagtcgcaatatttaagctaagcggttatgtgatatagtaatatgctctttcttgttgtttgatgatgtagttccttacttttctcttaagggaaagagtaagaaaaatactgattattaaccagaaaagaatgatttctatgatggtcaatattgggtatataattatcttgtctttttttacttcatctatgtatttatttagttcaacttggtttttctcatcattaaatatttcgcaaatcaatgatgacaactctggagagatgttttttattctttttagttgattgttatttccaaggcattgttttttgtcaatagaccaagggtgacgggaaaacaaagatgattccttggcggaatggttggtgataaagaagctttcatttgttgtttttaacgttaaaagagtccacccattttgaatgcgtaatgtttgtatgtgcatgtgaaacacaaataaaagcccaatggtcactgaaaaaataataaagccagacagtattttatcaatgagtgtgttctggggtgttttttttagaggaatagatatggagaacaatctaattgtccagttggggatacctgctttactcaagtattcagattcgccgtttaatggtttgtttaaatatttaagtgttatcattcctgttgcgaatatacttcctaatactccaaggatgcttgaaaatatttcaatggttgacttgaaactttcgtcagtaaataattcagtgatagatagtgcgttactcatgttgtttcctcattgtgactgttacgctttgttgattttttattattcttataattttttcaagttgttaacagctatctagtctatgataagtacatggtgttattgacatgaaactcattgagttgggaaatgattagtggttaatatacgaaatgtcttcctatatttagctaagcggctattttagtaacagcataatatatctgaaatacgatttgctataagcccccacacctaaccccctcactccctctgcaaaaagaactgcttgatggtctgccgcagccagcgatgcgccggatcgcgatccaggcgcgggtgccaggcctggacgataaacaccgattccagctcgagcggcagctcgatctccgccaacggcaggtggatgttgctcaccccctgcagtacgtggcgcggcagcggcaggataaagtccgatttcatggtcagcatcatcgccgaatggaagcccggcagggtcagggcgacgttgcgctgcaggccgagatcgcgcagcgcgtcgtcgatcggcccctgcgagcgcccacggcgggagacgctgatatgcgggtaatgagtcagggtttcgggcgttacccggccgatgattgggtgcccagggcgcaccagcgcctgaaaggtgctggtgaacaggctctgcgtcttgatttccgggtgccagtcgcgcgaggaaccgatcaccagatccaccttgccgctgcgcagcgcgtcatcctcgccgtcgctttcagcgataaacttcaggccgcttaacggcgccatgtcccgcagcgtctccagcaagccgcccgccagcgcgccgataaaaatgtcgttggcgcgaatggtgaaggttcgggtcagcttgccgggttcgaaggattcattcggcgcgatcagcgcggtggcctgttcgatgatctcgccgagctggcgtttcaattccagcgcgcgcggcgtcggcaccagatgcttaccggctctgaccatgatcgggtcgtcgaactgccggcggatgcgccccagaatgcggctcattgccggcgcgctcaggttcatcttttcggcggcgccgctcacgctcccttcttccagcagcagattcagcgcatagatcaggttgaaatcaattttttgcggcatggcctctccggtggtggtgcgctcaatggattgcgttttgtgcaattagttaattacatcatttcattttaaacaatcgaaataagtccggatactgcccacgacaacaaagattgaggctgaaacagcaggagtggggaatggttgaggtgtctgttacgccgcaccacaaaaatcggtggctcgccagcgccggcgaaatcaacggccgcacctggctggggttgttcggcgtgtttttggcggtgatggccagcggcgtgggggaaaacgccagcaagttcgcgctggcggatatacagggcggcatgctgctgaatttcgatgccggcagttggctgaccacctgttacgttaccggctttgtgatcggttccgggttcacaccctgtttttggccgaccttttcgttgcgccgggtggcgttgacgatgtgcggcatttacctggccggcgggctgctgacgccctggttgggagaacagtatggcgtgttgctggcggtgcgcagcctgcagggcttcgccggcggcgcgttgccgccgatgctgatgacggtggtgctgcgttttatgccgccgctgatcaaggtgttggggctgggcgcctacggctgggtctcggcctggagcgctacgctgggcgccaccgccgccgctttcgcctttcactggggttggagtgggtacttctactggaacctgccgctgatggcgattgccgctgtgtgtatcggctacggtctgccgcaggatcctctgcggctggagcgcctgcggcagttcaactggcgcggcctgctgctcggcggcatggcgctcggcatgctgacggtgggcatttcacagggggagcggctcgactggctgaactcgccgctgatctacgttttattattgggcggcggcggattattggcgttatttctgattaacgaatggtatcacccgctgcctttttttaatttgcagctattaagcaaaaggaatttgtctttctccttaattacgctgggtggcgtgctgttaattatggtgtcgctggtcaatattacgtcgggatatttatccgcgattcagggctatcgtcaggaacaaacttccgacttaatgctgtgggtggcgttgccgcaattaattacgctgccgattgtcgccattatttgcaatacgccgcgggtggattgccgctgggtactggcgatcagcctgctgttgatggccaccgcctgcgtgctggccgcccagctgacgccggaatggaacggcgagacgtttcgcgttatcgcgctgttgcaggcggtcgcgcaaccgatggcgatcatccccctgctgatgcaggcgaccggtgggctgttaccgaccgacgggccgtttgcggcggcctggtttaacgcggtgaagggcttcgccgccaccgcggccggcggcgccatcgcgctgctcagccgacagcgcggggactatcacgccggcacgatcgccgacggttttggctcggcctacagcagcgcatcggggtcggcggagcagctggcgcagcttgccgcccggcagggccacgtgctggccagcgccgatctttatctgttggttgccggcctggcgttattactgaccgcgctgattttagttatgccgacccgtatttatccgccgcgttcggtcgccgcctgacattttatcatcagaaataaatattaagtggagtcacttttatggctaacaaaaaagtcgccgtcgccgtattggcggttaccgtcattacgctggggttattaatgaataagttttttattaaagagacacagcagaataccaacgacgcctatattcgcgccgatatctcgcgtatttctccgcagattgccggtgaaattgcgcaggtgttggtcagggacaaccagtgggttaaacagggggagttgctggcggtgatcgatccgcgtgaattcaacgttgcccttgcgcaggcgacggcgcaggagcaatccgcccgcgcccggcaggacgacgccagggccaacctcaaccggcagagcgcgctgatcgccgccgcgctggcggagcggcaggcggcgcaggcggagctggcgtttgcgcgtcaggagcagaaccgctaccagagaatggccagcagcggcgcggggtcgcagcaggcggcgcagcaggcgacaacgcgggtgcacacgctttccgccaatgtggcgcaggcggaggcgacgctcaaagcggcgcgaaacatggagcaggtgctgcaggccaagctggcggacagcgatgccgagctgatgctggcgcaggccaagaaagcgatggccgaactgaacctgtcttacacccgcatcaccgcgccgatcggcggcgtgatcggcaagaaaagtctgcgggtcggggagttcgtcaaaccgggtgatgcgctgctggccatcgtgccgcaggacaagctgtacatcatcgccaactaccaggaaacccagttggaaaacattgcgcacgggcagtcggtagacatccatatcgatacctttcccggccaaacgctgaaaggacaggtggacagcatcgcgccggcttccggcgtcagcttcgcggccgtggcgccggagaacgccaccggcaacttcaccaagatcgtgcagcgcatcccggtgaaaattgtatttgatatcaacaaagagcatgccgccttgttgagcgccctgcgcgttggcatgtctgcggacgtcagcatcaatacgctggacagaggcctgcaatgaacagagccgtgatcccgctgctgttgatggcgctgagcggctgccgggcggtagggccggactacgctcggccgcagaacgcgctgcccgagagctggggtgagcaggccggcggcggggcgttgccggtggcctggtggtcgatattcaacgatgcgccgctgtcgcagctggtgcagcgcgtggcggccggcaacctggatctgcagctcgccacggcgcgcctgcaacagagccgcgccctgctgggggtgacggaggcggcgctgatgccggatctgagcctggacggcgcctatcagcgccagcgagctacctcggtgggcagcatggatccgtccggcaacggcggagaggcggattacaacctctggcgcggcggcttcagcgccgcctgggagctggacatgtggggcaagctgcgccgcgcgtcggaaagcgcgcgcgccggctttgccgcttcgcaggagaatcgacgcgcgctgttgacgtcggtgacggcggaggtggcgagcaactatctgcgcctgcgcgccacgcagcagcagctggcggtggcgcaggaaaaccgcgccacggcgctgcgcacgctgcagttgacgcaaagccgctatcaaagcggcgcgggcaacgaactggatatcgatcaggcgcaggtgcaattggcgcaggtggatgctctgctgccgacgttggccgaccggcaagaacggctgattaacgccatcggcctgttgctgggtgagcggccgggcgcgctgaacgcgatgctgtcgccgccggggccgctgccgacgctggcgcgcgcggtgccgatgggggtgccgtcggatctggcgctgcgcaggccggatattcgcgaagcggcggagcgtttgcatcaggcgaccgccgagatcggcgtcgccaccgccgactactacccgcgcatcacgctgaccggcaacgcgggctaccaggcattggccttgtcggatatgggcagctggtccacgcataccttcgccatcggccccgttttgtatctgccgttgttcgacgggggaaaaatcacccagcgggtacgcctgagcgaatatcgccagcaggaaatggccatcgcctaccagcaaacggtgctgcgcgcctggcacgagatcgacgacgcgctttccggctatcgcgcccaacagcgccgccagatgcacctggccgaagcgctggccgccaaccgacacgcgtttgcgctggcgcgcgacagctatctgaacggcgccagcgattttatccacgtcctgagcacgcagcgcgcgctgctggatctgcagtccgcgcaaattgtttcagaggaggagacggcgatcgccgtggtgaatatctatcgagcgctgggcggcggctgggaactcacctacccgtctgcggcgccacaggagaaggctgatgcacaacacgctgaataagattgtcgacgagatgctggaaagggacacccgccgcaaacgggaggcccgggtgagcgccgtgcggcaagtcaccgctcggatcaggcgcatcacgttgagcggcgacgatgtggataagtttatcgccgatccgcgcgcgcaggagccggccagctgggtcaaggtgttcttcccgtggcgcgacacgctggccgggcgggcctacaccctgagcggcatcgacaaactcgcccgcaccttcgatatcgacatggtgctgcacggcgaaggcccggcgtcgaactgggcgcgcgacgcgatgccgggcgacaagctggggttcgccggcccttgctccggcggctttcggctgttgccgcaaactcgctggctgctgttgctgggtgatgagaccgcgctgcccgccatgcgcaccattatcgcctcgctctccgccccgttgccggtgctgtggttcgccgaggtgggcgatgcgcaggagatccaggacgtcgattgctcctttttgcaggtgaacagctggcaaatccgcacccgacatttcgacagcgtgatgaacagtccgctggtgcaggccgtcagccattgcgagctgccggccggcgaagggcaggtgtggttggcctgcgagcaccaggtcgccgcctatctgaaggcgcgttttattaacgaaatgggcatttcccgcgccgccttgtttgccaaaggttattggaaaaagggcgaagccaatttcaagggcgcgatttaactcgggcgagtgaggatggttatgattgagagagtgttattggcggtggactgctttgaacacagcggcaacgccctggaatttatggcgcgcctgcaaggcagcatcggcggcgtgattgtgctgacggtggtggacaatgccttcacgctcagccgcagcggcctgcgtttcgacagcgatgagcgcgaggagtatcccgccgcccaacgggaagaagcgctggcggaaaagcaggtcgggcaggtgacgcgggcgctgaaacagcagggcttcaatgcccagggcttgctggccgcgggctcgcccatcgaggtgatcccggaacagatggcgctgttcaactgcgatctgttgatcatctcgcaccgccacctgtcttcgttggggcgctggctgaacgcttccgtcacgcgtggcctgctggatgagatcggtcaaccggtattggtgatcccgcgctaagctatgggtaagggcagccgcatgcggctgcgcgcgttcggcgacgaaggccgcacataccggaggtcaacatgcgaagtctggaagatcaccttgccgcttatgccgcctatcaccgcgatgcgcgcaatatcgccacgcattttatcggtatccccctgatcgtcatcagcctgctggcgctgctctcccggccggcgtggggcgcgggagggctgccgttttcgccggcctgcgcggcggttatcgtctcggcgctctattacctgcggctgaacctgcgccttggcatcatgatgctggcgttgctgctgctgtgcctcgggttcggcgcctgggtggcgtcgctgtcgacggcggcgtggttgagcgtcggcatcggcggcttcgtcgtcggctggctgtttcagtttgtcgggcacttttgggaggggcgaaaaccggcgtttatggacgacgtgacgggccttatcatcggcccgctgttcgtgctggcggaagcctgcttcctggccggcgggctgcgcgaactgcagcggaacatcgaactgcgcgcgggcaaagtgcgcaatgggaggggatgaggtggcgttgattcccacggtgacggcatttccgctgcagcaggcttttatcccgctgctggaggcgctgacggcggggctgccgcgccaattcccggcgctcatccacagcatttacctctacggcagcgtcgcgcgcggcgaagcccttcccggcgtgtccgatctggacatcacgctgttgctcatcaagccggccgatagcggggcgttgcagcgccttgaagcgtggcggcaagcctttcagctggagcagcggatcgtgagcaaggtcgactttgacatcggcagcgttgatgaagcgttggcgccggagcatcacgattcctggggattttggctgaagcatcactgccgatgcctgtggggcgaagacgtgtccgccgctttttcgctgtttcgtcccgatcggcgcatcgcgctggcggtcaatgctgatttacggcccgcgttggcgcgttatcgggagcaactgctgcaggcaaggacggtatcggatgagaggtgcttaaagcgcgaagcggccagaaagctgatccgcgccaccaatatgttgcgcgccgaggggagcccgttctggccgataacgctaaccgactatgccgatcagctgttggcgctttatgcagagcagcgcgatgaaatggactattggttagcgcacgcggcaggggaggcgaatgacgcggattttagcgacagaatgatgcaatttcttgactggatcgaagcacagaaaaaaataacgccggcttgagccggcgttgtcggcgagcgttacccgatcgccgggtaatcggtgtagccttcacggctgccgccgaaaaatttctctttaatgggcgcattcagcgccagcccgtgttgcaggcggtgaggcagatccgggttggcgatgaacgggcggccgaagccgatcagatccgcccagcctttggccagcgcttcttcagcgcgttcacgcgtgtatttgcccgagtaaatcagcgtgccgcggaaaatcaggcgcagtgattctttgaacgccgccggcatcaccggggcgtcatcccagtccgcttcggcgatgtgaatgtaagcggcgccgatatcgttcagcacgctggccgccgccagataggtggcttccggggtatcgtcctgcgagcccatcagggtggtcagcggcgccaggcgcacgcccagtttctctttgccgatggcgtccgctaccgcctgcgccacttcccgcaggaaacgcaggcgattttgcagtgaaccgccgtattcgtcgtcgcgctggttttcccgcgagtcgataaactgattgatcagatagccattcgcgccgtgcagctctacgccgtcgaaaccggcggcgatggcgttgcgggccgcctgagcgtagtcattgacgatcgccggaatttcttcccgcgttaaggcgcgcggtgcggagtgttgcaccatttcacccacgccatgttccggcccgcggccttcgacatccacaaataccttgaccccatcggcctggatagcggaggaggagaccggcgcggcgtggccaggctgtagaatggtatgcgacacgcggccgacgtgccaaagctgcgcgaagatcttgccgccggcctgatgtacggcgtcggtgacttttttccaaccggcgatgtgttccggggtgtaaatgccgggcgtccaggcataaccctggccttgctggctaatctgcgtgccttcgctgacgatcagcccggcgctggcgcgctgggcataatattcagccatcatgtcggtggcgacgtcgccggcgccggcccgagagcgggtcatgggcggcatgacgatgcgattgttcagcgataaaccgtttaaagaatacgagtcaaaaagcatggcgcttccctctgtgtgaatggggccgtagggcattgatgttttactgaggccattatatttcgtcgtttaattctaaaaacgcgcacaataacaaaacacttttgctctgtgttcaatagttgcggtggccgccggcttgccgccggtggcgggaatgaacccgatgtgcgctcgggcgacggcggctattgcctgtcggcgcgtggttgggatagagtcggctgctgtttttccccacgatttttaacaaaatcgcaaaagtcttttagcctcccgcctgcttatctttggtgtgatcaatgtcatacttttggcatcttaactttcccgcgcttcggcagcggttaaccggagttgttgaatgaaaattaactttcccttattagccctggcggtgggggcgttcggcatcggcacgaccgagttttccccgatggggttgctgccgaccatcgccaaaggggtggacgtctccatcccgatggccggcatgttgatcagcgcctacgccgtcggcgtgatggtcggcgcaccgctgatgacgttgctgctttctcaccgggcacgcagaagcgcgctgatcttcctgatggcgatctttactctgggtaacgtgctgtcggccgttgcgcctgactacaccaccctgatgctgtcgcgcatcatcaccagcctgaaccacggcgcgttctttggcctcggatcggtggtggccgccagcgtggtgccgaaggagaaacaggccagcgcagtggcgaccatgtttatgggcctgaccatcgccaatatcggcggggtgcccgccgcgacctggctgggtgaaaccatcggctggcgcatgtcgttcctggcgacggccgggctgggcgtgatcgccatgctggggctgtggttctcgttgccgcaaggcagcgccggcgcgcgtccggatgtgaaacgcgagttgtcggtattggtgcgccctcaggtgctgtccgccttgctgacgaccgtgctgggcgcgggcgcgatgttcacgctctatacctatatctcgccggtgttgcagcacatcaccgatgcgacaccgctgttcgtgacgtctatgctggtgttgatcggcgtcggtttctccatcggcaactacctcggcggcaagttcgccgaccgctccgaaagcgcgacgctgaaaggcttcctgttgctgctggtggtcattatgctggtgatcccgttcctggcgcgcagtgaaatcggcgccgcagtcagcatggtgatttggggcgcggcgacctttgccgtggtgccgccgctgcagatgcgcgtgatgcgtgtcgccagtgaagcgccggggctgtcgtcttcggtcaatatcggtgcctttaacctgggcaatgcgctgggcgccgccgccggtggcgcggtagtctccgccgggctgggatacagcttcgtgccggtgatgggggcgattattgccggattggcgctgctgctggtgctgttcacccaccgtcaggccgaaaaagtggcctacgccaacggttaaaacgacagcgtgcggcggggttccacgccgcgctcactcaaagccgagcaggctgaacgcatcgtcctgcggggcgtagccgagcaggcgacgggtctcttccagcgataaacgcgtgtagcggttattggaaaccccgtgcaccaccgcatattgcaccccgtcgacacgaatgcagcgctccagcagatcggcggcatcgcgatggctgagaaatgcgctcatgtcgcgggcgctgagccgatcgcccgggctgagggtggtgaagttggcgatgcgcaccgacagggcggaaagcccttcctgatgggcgaagtaggcggcgatgccttcgccgaacgccttgctggcgccgtacaggtttttcggtttcggcgcgtcatccgggcggatttggtaatcgagcggatagccttccaccgcctgtgcgctgctggcgaacaccacccggcggcagccggcgtctttcgccgcgcggaaaatattgaaagtgccgagaatgttgttgtccatcaacgaaccgcaaaagtcggcatcgggggagggatcggcggccagatgcaacacggtgtcgatattggcgcaggccgcgcggcaggcgtcgagatcggcgatgttgaagctgatgacttcgtcgccgggctgcagatcgtgcagcaggctgacatccctttccgccagccgcagcgcgtagcgatcgcccatcgcctggcgaaacgccgtggctacccggccgccggcgccggtgatcagaatccgtcccaactcagtccgcaacgtcatggtcgctgtcatccttacaatcgattacgcgttgaccagtaataatcgcccgcgtgacttttgtccagtcgttttaattagtcattctgatgtttctttcaccattatcaattgcacatggtgatttttgcgcaggtgaatatcgtggaatgttaacgatgcgcaatcaagtttggcgatctatttgccttatggattgccgatttcgaccaaaaaagcggggattgacagtggatggacgagcgctttgctttcgcctgaccgtgaattattaggttagttaatcttatgtttttgcctgaggcgggcgatattccgccccctctctattccgcctgcgcgatatatcactgctgtgctgaagccgatagagggcgacaggccttatttgatacctcaggtcggttttgcccgcccgatcacagttcggcaatttgccgacgcaaaggcttgccccggcaaaatccgcggtgttaacgtcataactcaaccgatttagggttgttactgctacggcaggcaaaacctaaacctcgcgtttctgttccccgatggggcagaggccgcgaggtttaggtttttttttgcgccgaattttgcctcagcgccaggccagcgtggggcggggagcggcagaacgcgaagtctaaggataactgtatgaaatatgacacattagccagtgagattttggccggcgtcggtggccgcgacaatgtgaaaagcctggtgcattgcgctacccgcctgcgtttcaagctgcgcgacgacaatcgcgccaacgcggcagcactgaagaaaaaccccggcgtcatcatggtggtggagagcggcggccagttccaggtggtggtgggcaaccatgtggcggaagtgttcgacgcggttaaccgcgttggcggattggccgaaggcgcgccgagcgacgacgcgggcggcaaaaaagacaacttgctcagccgctttatcgatctggtgtccggcatttttaccccgctgcttggggtgatggccgcttcggggatcctgaaaggcttcctggcgctgagcctggcctgtggctggctgctggagagcggcggcaccttcaaaatgcagttcgccgccagcgacgcgctgttctacttcttcccgatcatgctcggctacaccgccgggaaaaaattcggcggcaaccccttcgtcaccatggcgatcggcggcgcgttgacgcatccgctgatgatggcggccttcgaagcggcgcagcagccgggcgcggtgcgcgagtatttcttcggcattccgctgaccttcatcaactacagctcgtcggtgatcccgatcatctttgcggcctgggtgtcctgccgcctggagccgctgtttaaccgggtgatccacagtgcgctgcgcaatttcatcacgccgctgctgtgcctggcgatcaccgtgccgttgaccttcctgctgatcggcccggcggcaacctggctcagccacctgctggccaacggctatcagagcatttacgcctttaacccgatcatcgccggcgcctttatgggggcgatgtggcaggtgtgcgtgatcttcggcctgcattggggattggtgccgttgatgatcaacaacctgagcgtgctggggcgcgacaccatggtgccgctgctgttgccggcggtgatggggcaggtcggcgccacgctgggcgtgatgctgcgcactcgcgacgccaaactgcgggcgctgtccgcttcggccatcggcgccgggattttcggcatcaccgagccggcggtgtatggcgtcacgctgccgaacaaacgcccattcatcttcggctgcatcggcggcgcgctgggcggcgcggtgatcggctacttccatacttcggtttactcgttcggcctggtgagcgtgttcaccttcgcgcagatcatccccggcggcggcatcgacgccacggtatggggcgcgatcggcggcaccctgctgtcgttcgtgttcgccgcgctggccagctatctgttcggcgtcgcgccggcggaagaggccgccgcacagcctgaagccgccgcgcctctcaaccgcaaacaggcgattctcagcccgatcgccggcgacatcgtgccgctggatcaggtgaacgacgcgactttcgccagtggcctgctggggaaaggcgtggcgatcgcgccgcagcaggggcgcgtggtggcgccggtgagcggcagcgtggcgtcgctgttcaaaacgaaacacgccatcggcatcgaatcggacgacggcgcggagattcttattcacgtcggcatcgataccgtgaagctggacggggcgcatttcaccgcccacgtgcgggaaggcgagcgggtcgccccgggcgatctgctgatcgagttcgaccaggcggcgatccatgccgccggctatgacaccaccacgccgatcatcatcagcaacagcgatgattacgtggacgtgttgaccagcggcctgtctccggtgcaggaacaggcgccgctgctgactttattacgctaattgaggagcaagcgatgaacggcaagtttccgcaacattttctgtggggcggcgcggtagcggcgaaccaggttgaaggcgcgtatcaggccgacggcaaggggctgtcgacttccgatctgcagccgcagggcatcttcggcgccatcacgccgcgcgcggcgggcgacagcggcatcaaggacgtggcgatcgatttctatcatcgctatccggaagacatcgcgctgttcgccgagatgggcttcaaatgcctgcgcacctcgatcgcctggacgcgcattttcccgcagggcgatgaagagaccccgaacgaagccgggctggcgttttacgatcggctgttcgatgagatggcgaaatacagcattcagccgctgatcacgctgtcgcactatgagatgccttacggcctggtgaaacgctacggcggctggggcgatcggcgcaccatcgacttcttcgagcgctacgcgcgcacggtgttcgaacgttacaagcacaaggtcaaacactggctgaccttcaacgagatcaacatgtcgctgcacgcgcctttcaccggcgtcggtctgccgccggagagcgacaagagcgccatctatcaggcgatccaccatcagctggtggccagcgccaaagcggtgaaggcctgtcacgagatcgtgccggagggcaaaatcggcaacatgctgttgggcggcattctgtatccgctgagctgcaagccggaagatctgctggaaacccagcggcaaaaccgcgactggctgttcttcggcgacgtgcaggcacgcggctattacccggcctatatgcagcgcttcttccgtgaaaacggcattcaggtggcgatcaccgaggaagatcggcgaacgctgcgtgaaaccatcgatttcatctcgttcagctactacatgagcggctgcgtcaccgccgacccggagcagtatgagacggcgcgcggcaacattctcgatatggtgccgaacccgcatctggccagctcggagtggggatggcaaatcgacccgatcgggctgcgctacctgctcaacgtgctgtacgaccgctatcagaaaccgctgttcatcgtcgaaaatgggctgggcgccaaagaccgcgtcgaggccgacggcagcatcaacgacgactaccgcatcaactacctcaatgatcatctggtgcaggtggcggaagcgatcgacgacggcgtcgaggtgatgggctacaccagctggggaccgatcgatctggtcagcgcttcgaaggccgaaatgtcgaagcgctacggcttcattcacgtcgacagggacgatgccggcaacggtagcctcgagcgccgccgtaagaagagtttctactggtaccgcgatgtgatccacagcaacggcgccagcctgaaagaccgacgctaacccttcagcccggcggcaagcgccgggcgttaacctaacgttattcgctgctgttcatgatgggaaattctctcccagggaatgctgttgcccgcagtcagccgttatgcggagaaatataataatgatgaaaagcttattacctcgttccatgaccctggcggcgctggcgctgctttgtagccaggcgcaggcggaaacgctgcaaaccggcaaggacgtcgaagcccccaccgccaaatgggaaggagtggcgctcggctttgagccgccgcagcccgggctgttgggggatatgctggggatcaggccgatcctggaggatcacggcttccactataatctcggctacctcagccagctgtcgtataacgccggtggcggttacaaccacgataaacaggcgtcgtatatcgaccagttttcgctgaccttcagccaggatttgcaggcgctgaccggcattccggacgcggcgatcgaaggcaatatcgtcaaccgcaaccatgacaacaacctgacccgcgatcgcctgcaggatccgcgcgtcggcctgaccgatctgtcgcaggagagctttggcgggcagtcgattacccggctgggttggttgacctttagccgctccttcctcgatcgccggctgcagtggcgcatcggcatgatgaacaaggtgcaggatttcgatcagatcatcccctgcgattttcagacgctgacgctgtgcggcggcaagtccgccaactcgttgacctggtacaactggaacgtgcattactggggcacgacgctgcaatacaaactgaccgatggcctgacgctcaagggcggcgtgatggaacagaacccgagcgcccccagccgcagccacgcctggagctggtccaccaagggcagcaaaggcttcctgctgccgatggaactggagctgaaaacccacgccgtcaaccagctgccgggggtgtataacctgggcgtgctgttcaccaacgcgcgccagagcgatctttatgaaggggtgtccggcgggccgggcgccagcgatccgcagggctatcgcagccacgatcgcacctggttcctgtataccggtttcaaccagcaggtgacgcgccatgcggacgacgtcaaccgcggtctgagcgtgttctacagcctggggctgggagatcagcgcagcaactacctgcactggtccacctcgaccggcatccgctatcgcgggctgttcgatgcgcggccggacgactggctggggctcggcgtctcggtggtgaagctgagcgaccgctacaaagacaatcagcgttatctcaaccagatgagcggcatcagcgattatcacgatccgaactatcggccggtgccgggccactcggtgacggcggagctctattatcgcgttaacgtcacgccgtggctgcagctgcagccgggcctgcaatactggcatcacccggcgggcgtcagcgagacgcaggacgcctgggtgacggcgttgaaaacggtggtgaccttctgatcaggccgcgtcgctctcgcggtagcgccggcgggcgtgctcaaaccagctggccggcacgttgtgcggcggctgctgtaatctgagcagcccctgttcgacgatatggctggcctggcgccacagcgtcgggtcgccttcggtcagcacttccagcaggcgttgtttctcaatcagataggtttgggcgaagtggctgtcgtagtccagcagcgagcgggtgttgtcgatcagatccgccagcttgatggttttggcctgcggcgacgcgccggcgctgtggcgccgatcgcggtttttacgctcgaagcggttgccgtcctcggcgcggctgacgttggtcaacatccgcaccagttccgccacttttggcccaaagtggctttcgatatcgccgagggtggtgggcgtatcttccaccgtgtcatgcagccaggcggccgccagcatctcttcggtgtgcggcacgctgcgcaccagctccatcaccgcctgtgggtggacgatgtacggatcgtcggtgtatttgcggcgctgatcgatggccgcatgcgccttggtggcgtagcggcgcgcgcgttctgcaagcgtattcgtcatttcctttccctccgagcatcctctgcatgaaaaaaaggtagcatatctcacaagaaatagcttgcgattacatcgtgcactatctatattcacaaacatgaaaagcaccgataccgcacaacccaacgcgaagaacctgctgcagctcgatcagcagctctgtttcgcgctgtactccgccaacctggcgctgcacaaagtctaccgcaagctgttgaatcagctcgaactcacctacccgcaatacctggtgatgatggtgctgtgggagcgcgatcgggtgacggtatcggatatcggcgagcggctgttcctcgattccgccacgctgacgccgctgctgaagcggctggaaaccgccggtttgctggtgcgctatcgcgccaccaccgacgagcggcaggtgatcattgccctcaccgaagccggccgcgcgctgcgtgagcgggcgcaatcggtgcccgaggcggtgatgtgcgccaccgactgcagcctggacgagatcgtctcgctcaaacagcagttggaaaagctgcgcggcagcctgatcgatcagatttgatcctccagcgccggacgcaagaacggcaggggtggtctacactggttaataagtgtcaaaaataagtagtgcgcgatttaatcgcaagagataaatatgtgaccggctttacctcgtggaagccgtagtcatctcgccaaccagcaagaaggaatgaacgatgtctattgagaaagtggtttaccgcgctcacgccaccgcaaccggcggccgcgacggccgtgcgacctcctccgacggcgtgttggacgtgaaactgggcgtgccgaaagagatgggcggcgccggcggcgaagtcaccaaccccgaacagctgttcgccgccggttactcggcctgcttcctcggcgcgttgaagtttgtcgcggcgaaagaaaaggtcaaaattccggccgaagccaagatcgacggcaccgtcggcatcggtgaaatcccgaatggcttcggcatcgaagtgcagctggatatctcgctgccgggcatcgagcgcagcgtggcggaagatctggtgaaaaaggcgcatgtggtgtgcccatactccaacgccacccgtggaaatatcgatgtaactctgaacgttaagtaagatttttgccgatatctggaaaaaatggagggtttatccctccattttcttgcgtgccctgtctgaaaaccgctcaaaaaaacggtaaattttgtccgttttgtgagaattctcttgattattacccgcaaaataacgcttattgccggttggctgaaccagaagccgcaatcagtgtctgactgagtcagaaccgctacaccgtccccggagccaccgcgttacatgaacaaagttaaatcgctatcacagcagaatttatcgttattgttagcgatctatatcggcatctttctaaacctatccgttttctatcgccgctttgattcgctggcgcacggcattcagggaattaagcttatttcggcggtgacggaagtcatcgctatcgtcctgtttacgttcttcattatgcggctggtatcgctcggcggccggctgttttatcgcatcgtcgcctcgctgctggtgttgatttcggttgccgccagctactacatgacgtttttcaatgtggtgatcggctacggcatcgtggtgtcggtgatgaccaccgatatcgatctgtcgaaagaggtggttggcctgcacttcgtgctgtggatggtggcgctcagcgccttgccgctgctgttgatctggaaaaacaacctgcgctataccctgatagaacagctgaaaacccctggtcatcgcatcaagccgctgctggtattgctggcggtggtggcgctggtctggctgccgctgcgcatgctggacgacgagcagagcgtgcaagagaagctttccaacgtcgatttgccgagctacggcggcgtggtggcgcactcgtatctgccgtccaactggctgtcggcgctggggctgtttgcctacacccgctatgacgaaagccaggatcagagcacgatgttcgatccgggcaaacacttcacctacgtaccgccggcggacatcgacgacacctacgtggtgttcatcatcggcgagaccacgcgctgggatcacatgggcatgctgggctacgagcgcgataccacgccgcggctgtctaaagagaagaatctggtggcgttccgcggcgagtcgtgcgataccgccaccaagctgtcgctgcgctgcatgttcgtgcgtgaaggcggcaccgaagacaatccgcagcgcacgctgaaagagcagaacgtgttcgcggtgctgaaggatctgggcttctcttccgagctgttcgccatgcagagcgaggtgtggttctacaacaacaccgaggtgaacaactattcgttccgcgagatgatcgcgtccgagaagcgcaacgacggcaaggcggtcgacgatatgctgctggtggacgaaatgaaggagtcgctggcgcgctatccgaagggcaagcacctggtgatcctgcataccaaaggctcgcactacctgtactcgcagcgttatccgcgcagctatgcgcgttatcagccggagtgcatgggggtggacgattcctgcaccaaggcgcagctgatcaatgcgttcgacaatacggtgctgtataccgacagctttatcagtaatgtgatcgaccaggtgcgggacaagaaggccatcgtgttctatgccgccgatcacggcgaatcgatcggtgagaatacgcacctgcacggtacgccgcgcgaaatggcgccgccggagcaattccgcgtgccgatgatcgtgtgggcgtcggacaagttcctcgaaaacccgcagcacctcagcgcttttgagcagctgcaggcgcagcagcgcatcggcaaaacgcatcgccacgtcgagctgtttgacactatccttggctgcctcggctacacctctcctgatggcggcatcgtggataaaaacaactggtgccatctgccgcaggataaaacggcgcctgcccgcctgtgatccctcccgccgggtgcctgccttgcgcacccggtaatttcacccaatacattctcttcatcaattattccggtgtgcgcatacggtatacttgcgcacttcccctgctaaccggagatttccatgaccctgcgcgtggcgtttatcgacgatcatgacattgtgcgttcgggctttgtgcaactgctgtcactggaggccgatattcaggtggtgggcgagttcagcagcgcggcacaggcgcgcgccggcctgccggggctggaggcggaaatctgcatttgcgacatttcgatgccggacggcagcgggctggatctgctggcggacattccttccggcatccgcgtggtgatgctgtcgatgcacgataacccggcgctggtggaaatggctctggaacgcggcgccagcggctttctctccaagcgctgcaagccggaagatctgatcaccgcggtgcgcaccgtcgccggcggcggcgtctacctgatgccggaaatcgcgcagcagctggcgcgggtgagggtcgatccgttgacccgccgcgagcgcgagatcgcgctattgctggcgcagggccaggaggtgcgtgagatcgccgccgccttggggctgtcgccgaaaacggtgcatgtgcaccgcgccaacctgttcgccaagctgggcatcaacaacaacgtcgaactggccagacggatgctgaacctgtgacgcagcgcctgatcacccagctggcgctgtttttcatctacgccgccagcgcgttttgcctgtggggcatcggcaccgcgctgatcgaccccccctggcaggcgctgctgctgtttccgttcggcctgcgcatgggcattttgctgcagagcccgtaccgtttctggccggggatcctgctggctgacctgctgctgatggcgttgctggcggatcagttcggctacggcccggcgctgtgggcgtcggtggcggtgctggtgttgacggtgctgctcagcctgctggcctcgccgtggctgttgcgccatcagcagagcgacagcgaatggcgctggccgctgttgcagggtgcggtggtcgccatcgccgccttgctgcaggcgttggtatggcagctggtgagcggcgaaggcgcccgcgcgctgctgctcggcctgaccggtggtttcaccatcgcgccaacctgcctgctgttgtggcactatctggcgcgccaaatctgggtgccgctggagccggggctgatccacaagccggtggagctgcgtctgggccacctggccagctatctgttgctgtttgcgttcagcatctggctgcagcagcaggttaacgccgccgagctgcgccgtttcgcgccgttctgcctggcgatccccatcgtgttcatgtcttatcgctatggctggcagggcgcgctgttggcgacgctgctcaacggcgtggcgctgatggtcaacgagccgccgcagccggagtcgcaccgcgatctgttgctgtcgctgctggcccaaagcctgaccgggctgctgctgggcgccggcattcagcgccagcgcgaactgaatcagcaactgcggctgcggctggcggagaatcggcagctggcgcgggcgctggtgacggcggaggagcaaacccggcgcgaggtggcgcgcgagctgcacgatgaagtggggcagaccatcaccgtgatccgcactcaggccagcatcgtcaagcgtctggcgccggaaccggcggtgatcggctgcgccgacaccatcgatgcgctggcgctgcgggtctacgacggggtgcacgatgtgctgacccagctgtggccggcggcgctgaacaacctgccgctgtcggcggcggtggcggcgatgctgcgggagtcgctgccgcaggacgcgtcgctggtgagcagcatgcaatggcaggtgcccgacgagctgctggatgaaacgctgaaaatcacgctgtatcgggtgtgtcaggaaggggtgaccaatgtgtgccgccacgccggcgccagtcgcctggagctggatgcgcgcctgcagccgcgcaaaggcgccgcgccgcagatcgccctgaccatccgcgacaacggcgtgggcttcgatgcggaaaaccatcagccggggtacggcctgcgcggcatgcaagagcgcatcagcgccctcggcggcagcctgcggttcaccgctgagcggggcgcctgtttgagtgtgatcttgcccacagtttcaccggcgcaaacgcaaaactaggaaaaactcctaaccgcctcgagaatccggcgtaagccccctgcgcgcgcgaggagcatcatagcggcactttaattcaatcctctgaggttccacatgtggtctttccttaaaagccgcccggatgcgccgcaggtcaccgatcaacggcagatcgacgccagctacaaatactggcgcattcagctgatgtgcaccatgtacatcggttatgccgcgttttacttcacgcgcaaaagcttcaacttcatcatgccggcgatgctgagcgatctgggtctgacgatgtccgacgtcggcatcctcggcacgctgttctacatcacctacggctgttcgaaattcatttccggcatgatcagcgatcgctccaacccgcgttactttatggggctgggcctgatcatgaccggggtgctgaatatcttcttcggcctcagctcgtcgttgatgatgctgggcacgctgtggatcctcaacgccttcttccagggctggggttggccgccgtgctctaaaatcctcaccagctggtattcgcgctccgagcgcggcagctggtgggcgatttggaacacttcgcacaacgtcggcggcgcgctgatcccgctgctggtcggctttatctcgctgcacttcagctggcgttacggcatgatcattcccggcatcatcggcgtggtgctcggcctgctgatgtgctggcgcctgcgcgacaagccatccaccctggggctgccgagcgtcggcaaatggcgcaacgacgccatggagctggtgcaggaatcggaaggccaggggctgagcaaccgcgagatcatcaagcgctacgtgctgaccaacaagtacatctggctgctggcggtctcttacgtgctggtgtatatcgtgcgcaccgcgatcaacgactggggcaacctctacctgacgcaggaaaagggctattcgctgatgaccgccaactcggccatctcgctgtttgaagtgggcggctttatcggttcgctggtggccggttggggttccgacaagctgttccgcggcaaccgtggcccgatgaacctgatcttcgctatcggtatcttcctgtcggtagccgcgctgtggctgatgccgggcgtgacttacctgctgcaggcctgctgtttcttcgccatcggcttctttatcttcggtccgcagatgctgatcggcatggcggcggcggagtgctcgcacaaggatgcggcgggcgccgcgaccggtttcgtcggcctgttcgcctacctgggcgcggcgctgtccggctacccgatcgcgcgagtgatggagatctggcactggaacggcttcttcgtggtgatttccatcgccgcctgcctgtcggcgctgttcctgctgccattcctgcgcgcgcagacgccggcgctgaaaccggccaacgcctgagtaaaatacgctgcgcaacccccggcgcagcgtattatggcgcttttatcaccacttgaaatgcaggggcaaaaaagtgattgacgcctataaccgccagcagtaagatgcgccccgcatcggcgagtagcgcagcttggtagcgcaactggtttgggaccagtgggtcggaggttcgaatcctctctcgccgaccaccattcgaaaaacctgcttttaaagcaggttttttttcgtctgcggtttatgaggatgagtacctccgcaggaggttcgagcctcgcgaagcgagacaacgttgctttagcaacggcccgcagggcgcgcatcaacgatgcgcgtaatcctctctcgccgaccaccattcgaaaaacctgctttttaaagcaggttttttttcgcctgtcgtttaggcggctttgcctactacgaagtcaaaatggatttcgtcataggggaaaatcacgccttgttgacctttatcgacgatgccgcagcctaacagcgcctgcagatcggtatgcaccgctttcacatcgcgtttcactcggcgcgcgacttcccgaatggaaagttcgccggcgccggtcatggtatgcaagatatgcattttcttgggtgataaggctttccacagactctcccaatccaggaatgtgatgtaatgcccttgagcgctttgctggcctgttgcggcttccttcagtgcgagtttcatttcttcgacggaagcgactcgaatggtgactgtattcatcatgattcctctgtgagcagcataacctcgcgccagaaactgtcgagcaaggcatcaatggtcgtgaaattaagcggctcttcttttccatcgatatgtttgtgatcgcctttacctgcttcattgtcatagcgcagtcgacaaatgccgtcttttacataagcaaatcggtatttataactgtggccgctggccttgacgggcggcaccacccgccaaatgacgagctgcgcaaatgcggcaggcgtcaagggtatcctgtcttggtagattagctgcgaaggcatgctctttccttaagtgttgttcacagtaccaacacagtcagggtattgtcaataatgacaacaccctgactgcagagtgtggtgcaatcctgataaatatttatctttccttaataaaaaattcactatccatatttgtcgtgctttcttttatttatattaaaataaattcacgcttgctgaataaaacccagttgatagcgctcttgttttcacgccttttttatttatagtctgaatgtacgcggtgggaatgattatttcgccacgtggaaagacgctgttgctatttattgattttaatcttcgaggattattgcggaattttttcgcttcggcaatgcatcgcgacgattaactcttttatgtttatcctctcggaataaaggaatcagttatgcgcaaatttaataaaccgctgttggcgctgttgatcggcagcacgctgtgttccgcggcgcaggccgccgcgccgggcaagccgaccatcgcctggggcaacaccaagttcgccatcgttgaagttgaccaggcggctaccgcttataatagtttggtgaaggtaaaaaatgccgccgatgtttcggtctcctggaatttatggaatggcgacaccggtacgacggcaaaagttttattaaatggcaaagaggcgtggagcggcccgtcaaccggttcttccggtacggcgaattttaaagtcaataaaggcggccgttatcaaatgcaggtggcattgtgcaatgccgacggctgcagcgccagcgacgccaccgaaattgtggtggccgacaccgacggcagccatttggcgccgttgaaagagccgctgctggaaaagaataaaccgtataaacagaactccggcaaagtcgtcggttcttatttcgtcgagtggggcgtttacgggcgcaatttcaccgtcgacaagatcccggcgcagaacctgacccacctgctgtacggctttatcccgatctgcggcggcaacggcatcaacgacagcctgaaagagatcgaaggcagcttccaggcgctgcagcgctcctgccagggccgcgaggacttcaaagtctcgatccacgatccgttcgccgcgttgcaaaaagcgcagaagggcgttaccgcctgggatgacccctacaagggcaacttcggccagctgatggcgctgaaacaggcgcatcctgacctgaaaattctgccgtcgatcggcggttggacgctgtccgacccgttcttcttcatgggcgataaggtgaagcgcgatcgcttcgtcggttcggtgaaagagttcctgcagacctggaagttcttcgatggcgtggatatcgactgggagttcccgggcggcaaaggcgccaacccgaacctgggcagcccgcaggacggggaaacctatgtgctgctgatgaaggagctgcgggcgatgctggatcagctgtcggcggaaaccggccgcaaatatgaactgacctctgccatcagcgccggcaaggacaagatcgacaaggtggcttacaacgttgcgcagaactcgatggatcacatcttcctgatgagctacgacttctatggcgccttcgatctgaagaacctggggcatcagaccgcgctgaatgcgccggcctggaagccggacaccgcttacaccacggtgaacggcgtcaatgcgctgctggcgcagggcgtcaagccgggcaagatcgtggtcggcaccgccatgtatggccgcggctggaccggggtgaacggctaccagaacaacattccgttcactggtaccgccaccgggccggtcaaaggcacctgggagaacggcatcgtggactaccgccaaatcgccggccagttcatgagcggcgagtggcagtatacctacgacgccacggcggaagcgccttacgtgttcaagccttccaccggcgatctgatcaccttcgacgatacccgctcggtgcaggccaaaggcaagtacgtgctggataagcagctgggcggcctgttctcctgggagatcgacgcggataacggcgatattctcaacagcatgaacgccagcctgggcaacagcgccggcgttcaataatcggttgcagtgcgttgccgggggatatcctttcgcccccggctttttcgccgccgaaagtttttttacgccgcacagattgtggctctgccccgagcaaaacgcgctcatcggactcacccttttgggtaatccttcagcatttcctcctgtctttaacggcgatcacaaaaataaccgttcagatattcatcattcagcaacaaagttttggcgttttttaacggagttaaaaaccagtaagtttgtgagggtcagaccaatgcgctaaaaatggccgcttagcataaattttcatgctggaactgttaacaaaaagttttttttatgtttgtttgctgtttctcacagtctgcgtaaatccccactggttatattgacgacaccccaaacagttggcaacttgatagcctcaggggtaagagcgagagttgtttgagtgaattccacgcgctcagacatccccgccgcgatgcgttccatccggcattctctcctcgtacgccttctgccttcgggcgccgatcgcacaggccacgcaataaaaaatacaggtctggcggcaattacacacatcacatcacacaatggagcactaacgatgacacgttccttgggtaaatcggggattctgaaattcggtattgggctgatcgcgctgaccgtggcggccagcgtacaggccaagacgttggtttactgttctgaaggttccccggaagggttcaacccgcagctgtttacctccggcaccacctatgacgccagctcggtaccaatctacaaccggctggtcgaattcaagaccggcaccaccgagctgcagccgggcctggctgagaagtgggacgtcagcgaagacggcaaaacctacaccttccacctgcgcaaaggcgtgaagtggcagagcagcaaagacttcaaaccgacgcgcgatttcaacgccgacgacgtggtgttctcctttgaacgccagttggatgcgaacaacgcctatcacaaagtgtccggcggcagttacgaatactttgaaggcatggacatgccgaagctgatcgccaagatcgaaaaagtggacgacaacaccgtgcgcttcgtgctgaaccgcccggaggcgccgttcctggctgacctgggcatggacttcgcatccattctgtccgccgaatacgctgacgtgatgatgaaagccggcacgccggagaaagtcgatctgaacccgatcggcaccggcccattccagctgctgcaataccagaaagactccaagatcctgtacaaggcgttcgacggtttctggggcaccaagccgaagatcgatcgcctggtgttttccatcacgcctgacgcctccgtgcgctacgccaaactgcagaaaaacgaatgccaggtgatgccgtatccgaacccggccgatatcgcccgcatgaagcaggacaagtccatcaacctgatggaacagccgggcctgaacgtgggctatctgtcgttcaacgtcgagaaaaagccgctggataacctgaaggtgcgtcaggcgttgaccatggcggtcaacaagcaggcgatcatcgacgcggtttatcagggcgcgggccaggcggccaagaacctgatcccgccgaccatgtggggctataacgacgcggtgcaggattacgcttacgatccggccaaggcgaaagagctgctgaaagaagcgggcatggccgacggtttcagcatcgatctgtgggcgatgccggtacagcgtccttacaacccgaacgcgcgccgcatggcggaaatgatccaggccgactgggccaagatcggcgtgaaagccaaaatcgtgacctacgagtggggtgaatacctcaagcgcgccaaagcgggcgagcaccagacggtgatgatgggctggaccggcgacaacggggatccggacaacttcttcgccacgctgttcagctgcgcggcggcgaaagacggctccaactactcccgctggtgctacaagccgtttgaagatctgattcaaccggcgcgcgccgaatccaaccacgacaagcgtatcgaactgtacaaacaggcgcaggtggtgatgcacgatcaggctccggcgctgattgtcgcacactccaccgtgtatgagcctgtgcgtaaggaagtgaaaggctacgtcgtggatccgctcggtaagcatcacttcgagaatgtctctgtagactgatttcgaccgctttaccggagacgcacgaatggacttgcaggggcgcaacaggtttgcgcctctgctgaccagtctccggcgtatggccgtcgaatcgttcaaaggcatgtgagcgttaataagcctggcggacgatgagctgccgggcattgatacagagagttcgggatatgttgcagttcatactccgacgtttggggttagttatcccaacgtttatcggcattacgttgctgacttttgcattcgtccatatgatccccggcgacccggtgaccatcatggccggggaacgcggtatctccgccgagcgccacgcgcagctgatggcggaaatggggctggacaagccgctctatcaacaatatttctcctacgtgtccaacgtgctgcacggcgatctgggcacctcactcaaaagccgcatctccgtctggagcgagttcgttccgcgcttccaggccacgctggagctgggtttctgcgcgatgctgttcgcggtgctggtgggcatcccggtcggggtgctggcggcggtcaaacgcggttcggtcttcgatcacaccgcggtgggcatctcgctgaccggctattcgatgccgattttctggtggggcatgatgctgatcatgctggtgtcggtgcagcttaacctgacgccggtgtcggggcgcatcagcgacacggtattcctcgacgacagccacccgctgaccggcttcatgctgatagacaccctgatctggggcgagcctggcgacttcgtcgacgcggtgatgcacatgatcctgccggccatcgtactgggcaccatcccgctggcggtgatcgtgcgcatgacccgttcctcgatgctggaagtgttgggcgaagactatatccgcaccgcgcgcgccaagggcgtgagccgcatgcgagtgatcgtcgtccacgcgctgcgcaacgcgctgctgccggtggtgacggtgatcgggctgcaggttggcaccatgctggccggcgctattctgacggaaaccatcttctcttggccggggctgggccgctggctgatcgacgcgctgcagcgccgcgattacccggtggtgcagggcggggtattgctggtcgcctgtatgatcattctggttaacctgctggtagacgtgctctacggcgtggtcaacccgcgtattcgccacaagaaataaggggcgctctcatgtctcaaatcactgagtctgcagttaaaggtgcgccgaagccgatgaccccgtttcaggagttttggcactatttcaagcgcaataaaggggccgtggtcggcctggtgtacatcgttctgatgctggtgatcgcgctcggcgccggcgtgctggcgccgcatgcgccggcggaccagttccgcgacgcgctgctcaagccgccggtgtggcaagaaggcggcagctggcaatatatcctcggcaccgacgacgtgggccgcgacgtgctgtcgcgcctgatgtacggcgcacggctgtcgctgttggtcggctgtctggtggtggtgctgtcgctgatcatgggcgtgatattcggcctgctggccggttacttcggcggcgtggtggacgcgattatcatgcgcatcgtcgacatcatgctggctctgccgagcctgttgctggcgctggtgctggtggcggtattcgggccgtcgatcgtcaacgcctcgctggcgctgaccttcgtcgccctgccgcactatgtgcgtctgacgcgcgcggcggtgctggtggaggtcaaccgcgactacgtcaccgcttcgcgggtggcgggcgccggcgcgctgcgccagatgttcgtcaatattctgcctaactgcctggcgcctttgatcgtgcaggcttctctcggtttctcgaacgccattctggacatggccgctctcggctttctgggcatgggcgcgcagcctccgacgccggagtggggcaccatgctctccgacgtgctgcagttcgcgcaaagcgcctggtgggtggtgaccttccccggcctggcgatcctgctgacggtgctggcatttaacctgatgggggacggtttgcgtgacgctctcgaccccaaactcaagcagtaacagaggacgagagagatggcgttattgaatgtagacaagctttcggtgcacttcggtgacgaaggcaccccgttccgcgcggtagaccgcatcagttacagcgtggagcaaggtcaggtggtcggcatcgtcggtgaatccggctccggaaaatccgtcagctcgctggcgatcatgggcctgatcgatttccccggcaaggtgatggccgacaagctggagttcaacggccaggatctgcgcaagatctccgaaaaagagcgccgccagctggtgggctccgaagtggcgatgatcttccaggatccgatgaccagcctgaacccgtgctataccgtcggttaccagatcatggaggcgctgaaggtgcatcagggcggcaaccgccgcacccgccgtcagcgcgctatcgacctgctgacgcaggtgggcattcccgatccggcttcgcggctggacgtatacccgcaccagctttccggcggcatgagccagcgcgtgatgatcgccatggccatcgcctgtcggccgaagctgctgatcgccgacgagccgacgaccgcgctcgatgtgactatccaggcgcagatcatcgaactgctgctggatctgcaacagcgcgaaaacatggcgctgttgctgatcactcacgatctggcgctggtggcggaagcggcgcatcacatcatcgtgatgtacgccggccaggtggtggaatccggcaaggcggcggagattttccgcgcgccgcgccacccgtacacccaggcgctgctgcgcgcgttgccggagttcgccgccgacaaggcgcggctggcttcgctgccgggcgtggtgccgggcaaatacgatcgcccgaccggttgcctgctcaacccgcgttgtccgtacgccaacgaacgctgccgtaacgaggagccggaactgcgcagcattcccggccgtcaggttaaatgtcacacaccgctggatgatgcggggaggccgaccgtatgagccagaatcaacctttactgcaggcgattgacctgaagaagcattacccggtaaaaaagggcctgttcgcgccggagcggctggtcaaggcgctcgacggcgtgtccttcaccctggagcgcggcaaaacgctggcggtggtcggtgagtcgggctgcggcaaatcaacgctcggccgcctgctgacgatgattgaagtgccgaccggcggcgagctgtattaccaggggcaggatctgctgaagccggacgtctcggccgagaaactgcggcgccagaagatccaaatcgtgttccagaatccttacggatcgctcaacccgcgcaagaaggtcgggcagatcctcgaggagccgttgttgatcaacacgtcgctcagcgccgccgaacggcgggaaaaagcgctggagatgatggcgaaggtcggcctgaagaccgagcattatgaccgctacccgcacatgttctccggcggccagcgccagcgtatcgctatcgcccgcgggttgatgttgaatccggacgtggtgatcgccgatgaaccggtgtcggcattggacgtgtcggtgcgcgcgcaggtgctgaatctgatgatggatctgcagcaggagctggggctgtcctatgtgttcatctcgcacgatctgtcggtggtggaacacatcgccgacgaggtgatggtgatgtacctcggccgctgcgtggaaaagggcagcaaagaggcgatcttcaacaacccgcgccatccgtacacccaggcgctgctgtcggcgacgccacggttgaacccggatatgcgccgcgagcgcatcaagctgaccggcgaactgcccagcccgatgaatccgccgccgggctgtgcgttcaatgcccgctgccgccgcgctttcggcacctgtgtgcagctgcagccgcagctaaaacagtacggtgagcagatggtggcctgctttgcggtcgatcaggacgaacatccgggggcgtaaagcgtcgaacgtcatcgcttaaattcacgccggcatcacgccggcgttttttattactcaatcaaagggttaataagtagaaaactaccacagtccgccattttaattacctccctaattaaattctgataagagttatttttctaagaatcttcgcatgagaataataatctaattatggaattcaacgggttgttgttaataacattatatcggcctatcggcttcaccatttttattataaaagcccaaaaaaaacgcgccgtcggcgcgctttaggttgatgaggccgcgcttattgcggataaggcacccagtcgccgccgttcaggcgaatgtaaggtttcccctgatattgcatcacgatggcgttgtcgttttcggagatgaccggggtctgcggcagcccctgggtcagcgcctgccagtcgacgctggattcgctgaagaccttgccgtccaccagacgtgataccagctccgacagcgccagatagctgctcggcgttttgatctgcagcgggctgccctgatgcggcgccttcatgcccaccagtttgatgccgaccggcgtatgggtgatgttcgggctgggaatatcgcgcaggccggacatttgcatcttgtcgcccaccaacgccgcgccgtgctccggcacgatcaccaccaccactttgcggccggatttttccagctgatcgaggaaggtgttcagctgatcgaacagcttctgcgcgcgcggctgatagtcggcgctcttgttggagccgacgaagcggttgccgtcgtgcagcgggatgacgttgaagaaggtggcggtgcgggcgtctccggctttttgctgctgatccagccagcgggtcagcaattccagatcgttataaatcggctcaccgtcgaacgacgtcagctcgttgccgatgccggcctgcgacattaacggcgcctgcatgtcgccctgttcacgcagctctttcaggtagttgccgaacacaccggagtgatcgagcatcagctgttgcctgaagccgagcttcgccaggttgtcgaacaggtaacactgctggttcaccggctggtacaaatcatgatgcgaaagctggccgcagctggcgcgcagcaaccgtatcgaggccgggccgctgtaggcggtggccgagttgaagctgtcgaacatgatgtccatcttcgaccacagcggatgattctgcaggttgaccgcctccatatcggcccaggccagcgaacagatgttgatcaccagcagatcgaacggttgggcgtcggcgggcaaggtggccgggaacgcggtggcgcggcctttttcccgctcgtagaactggttcaggtaggccgtcaggttggcgctggtcggcggcaggctgtctgccggcgcagcgtcccccgccgccggcgctgatgtggccggggtattggcgccgccggcggcagccgtggaagtggcgggcagcagtgaaaccgccggcccggcgatgttgacgatattgagccacaccagcgccgccacggtgaacaccgtgacgcgcacccactgtgcgacgaacaggtaggcgataaacagcacgaaggccgcgccgatcatctgccagttgataaagcggttgatcagctccagcagatactgggcgctgaaaccggccagctgcgagccctggctgaggatgctgttgatgcccggcagccaggtgtcgtggtagaacagcgcgatgccgatcgggatagcgaggtaatggcgccagcgatgcaggcgttgcgaagggatcggcatcagcagaaacgccatgaacaccaggttcggtagcgcgtggaaattcaggtagccgaaccacagcagggcgaatttggccagaaagtagaggttccagccgcccagcccgcgccagtagcgccacagagcgttatcggattgcgtcttcgagtttggattcatggctgcttcttacgtttaatctgagatgaggagcctgtgcgcacccataaaccggcggatttcaaatagcgcggcgataacaacaggttttgccagtattgacgcaaatgcggaaaacgccggtgaaaggcgtagcccagcggaatgaagatcagcgcgcacagcaggatcagttgcacgatgtcgttaaggttcagcatgcggttcctcctgcgggccaagcggcagcgtgaaggcgaccggctgccgccgttccgcgggcacctcggctgccgccacgcgggggcgcggcgcggcaccggcggcgccggtggccgaaatctgccagcgcccctgggccatgcgttttatttccgaaatgatatcgacatcctggtgccacaccacccggttgctgaaggcttcatccaccggcaggcggaagatgaacttcagcgcggtatccagatcgttgatgcggcaggtggaaaggaacagcaccagccgcccctgcaccacggtcatcacgtcgccgaaccgccgcaggtggcacagggtcatcgcctgttcggcgcgcaggccggtggccgggcgcagcgccaccatcacgcctttgccgtcctcaggcagcagcgtgttgcccatcagtgaaagcaccgcttggctgaacgcttccggccgcatgtagcctttgagctgcagcggacgcagcccggccagcagcgcatcgatgtcggcgggcacatgccgtgagaagcgctgcccctggatgccctcgagcatggtcagaaaacgcgacagcggcgcgacgtgcggcacgatcaggttggcgccgcaggccagcagcagccgttcgtcgctgtagcgcaggctggcgctcatctcgcgcaccgcgattttcaggccgttgccgcggctgcggcgcagggtgtggatctggtgcgccagatgatcgatttggtcgctttgatacaacgcgaaaatcaacgtcgccgagagtctcagcatgccgtgctgcgccagttcgtcgttgctctccagcagttgccagttggcggacagcggcggcgcgccttccaggatgctgcgctcggccagatactggctttcgtcgctgcgtaaggcggtgggggagggttggctattttcatcctcgccctgccagccgccttccgccgcatacaaggtcagcagctggttggcgttgatgccgttttcggtgctccaccagttcaccaggtattgcgcgctgtcctgctgccattgcaggctggacaggccgttcaggatgcggtgctgtgcgctgagctgccctttgagcttattgatgccgccgccgtggctgaggatcaacagcgtacagccctgccgccgcagccaggcggcgagggtgcgcgtccactcgcgcagctcttcggtggtgaaggtttgccacaggctggcgtgggccagcaggataagtaagcgattttgcggccgcagggcgcgcatcagatcgtcgttcaactgtgtcagcgcggcttttttctccggtaattgatacagcggcagcttctgcaacgcgggcgcagccagttcggccagcaggcgctcgggtttgtcgccgctgcagatcagggcgactttgtgagtggccggttgagcggcgatgacctggcgacacagcagcgcggcgtcgctttgcctgtcgatattgatccaataaagcccgggggcctgcatcaccgacagctcttcccaaatctgccgaatgcctagagaaaaagagtgcgccataggatgtattctactttcgttgaaagccgactaaaggcgtttatatttaaagatagccatttttacgctggcaataacaaatctccgacgctcttcaacaatatttgttgagaatcatcttattgcctctctctttttgtatcgttgctatagttaattaacatagcctattttcgccaaggcggaagaatgaataacgcacccacccattttcgtgcagcggcgcctggggagagccaggatgacctgcaggcgctcagccaggctttttcattgccgaaattacgctatgtcgatatttcgcggcaggagcggttaacgcaaatgatgacgcgctggccactgttggccgaattggcgcagaccacggggagccactgatctatgccggtgctcgcgctgcaagggttgcggggtggaatggggacgacctcggtcacggcggcgctcgcctgggcgttgcagcagctgggcgagtcggtgctggcgatcgacttcacgccggataatctgctgcgcttgcatttcaacaccccgttcgagctggcgcgcggctgggcccgcgcggagcgggatggcggcgtttggcaggaaggcgcgctgcgttattgtgaaaacctcgactttctgccttttggccgcctgaatggggcggaacggctggaagtgcagcaccagtgtcggcaacagccggaacgctggcgcgacaacctgcgccaactgatcgccggcgatccgcagcgctggatcctgctggatgtcccggtcggggacggcgtgctggcgcagcaggcgctgcagcttgccgacagcgtgttcgtgctgttgaaccccgatgccaactgtcaggtgcggctccatcaacagacgctgccgaatgactgccgtttcctggtcaatcactactcctccgccagccagctgcagcaggatctgcatcagctgtggctgcaaaccctgagcggcctgctgccggtggtgatccaccgcgacgaagcgttggcggaagcgctggcggtcaaacagccgttgggcgagtatcgccccgagagcctggcggcggatgaagtgctgacgctggccaactggtgcctgatcaacctcaaacggggcgttgccccatgagccgggtgctgagcctgctgctggtaccgccggtgcgtcaggcggtgcaggcgcgctaccgcggctatcgccgcaacggcgcgtcggcgctgaccgcctttttcgccacgctgttggtggcgctggggtggatgctgctgcgcttcgagtcaccggcctggcagcgcgtgcgcgtcggccgcgcttactggttcccgcatctgtccgccgaacgcccgcgcccggcggatgcgctgcgctatctgctgcagggcctgtggctgctgctgtttcgcagcggtcgcgcgccggtgccgcgcgactatttcgccgggtggcggcggctgcagcagcgctacgccgattggctgcagagcctgccgcaacggctgaaaaacgccggcgtggaacagcgttcggtagagcgcctcggccgcatgaaccgcggcatgcgacgcgcgctgtttattctggtcggcgtgctggcggcgatcctcgccatactgtgcatttcgcagccgttcgatctgtcggcgcagttcgtgttcgtcgtgctgctgtgggggatcgcgatggtggtgcgccgggtgccggggcgtttgcctgcgctgatgctgatcgtgatgtcgctgaccgtgtcctgtcgttacctgtggtggcgttataccgccacgctgaactgggacgatccgctcagcctggtgtgcggcctgttgctgctggtggcggaaacctacgcctgggtggtgctggtgctgggctatttccagaccatctggccgcttaaccgccagccggtgccgttgcccgaagacagcgccacctggccgaccatcgatctgatggtgccgacctacaacgaagacctcggggtggtgaagcccaccctctatgcggcgttgggcatcgactggccgaaagagaaagtgaacatctatatcctcgacgacggcaatcgccccgaattccgggcgttcgccgccgaagtgggggtgaaatacatcgccaggccgacccacgaacacgccaaggccggcaacatcaacaatgcgctgaagcaggccaccggcgagttcgtggcgattttcgactgcgaccacgtgccgacgcgctccttcctgcagctgaccatgggctggttcttcaaagacaaaaagctggcgatgctgcagaccccgcaccacttcttctcgccggatccgttcgagcgcaacctcggccgcttccgccagacgcccaacgaaggcactttgttctacgggctggtgcaggacggcaacgacatgtgggacgccaccttcttctgcggctcttgcgccattctgcgccgcagcgcgctggacgagatcggcggcatcgcggtggaaaccgtcaccgaagacgcccatacctcgctgcgtttgcaccggcgcgggcacacctcggcctatatccgcattccgcaggccgccgggctggcgaccgaaagcctgtcggcgcacatcggccagcgcattcgctgggcgcgcggcatggtgcagatcttccggctcgacaacccgctgctgggcaaggggctgaaactggcgcagcgcctgtgctacgccaacgccatgctgcacttcctgtcgggcattccgcggctgatcttcctcaccgcgccgttggcgtttttactgctgcatgcctacatcatcttcgcgccggcgctggcgatcgcgctgtatgtgctgcctcacatgatccacgccagcctgaccaactcgcgcatccaggggaaataccgccattcgttctggagcgaaatctatgaaacggtgctggcctggtatatcgcgcggccgacgacggtggcgctgttcaatccgcacaagggcaaattcaacgtgaccgccaagggcgggctggtggaggaggagcacgtcgactgggtgatcacccggccttacatgttcctggtggtgcttaacctggctgggctggcgttcggcgcctggcggttggcctatggcccgacggacgaggtgatgacggtgatcatcagcctggtgtgggtgctgtacaacatgaccattctcggcggcgcggtggcggtggcggtggaggccaagcaggtgcgccaggcgcaccgcgtggagatcgccatgccggcggcgatcgcgcgtgctgatggccacctctacccctgcacgctgcgcgattactccgatggcggcgtgggcattgagatgcgggtggagaatgcgttgaaagacggcgacaaggtttcgctgttgctcaaacgtggccagcaggaatacagcttcccctgtgtggtgacgcgcgccttcggcaacaaggtgggggtgcgtctggtcagtctctccacccgtgaacacatcgatttcattcagtgcaccttcgcccgcgccgatacctgggcgctgtggcaggacgggttccctgaagaccggccgatcgaaagcctgcgcgacgtgctggcgttgggcttccgcggctatgtgcgcatggcggactacgcgccgccgctggtgcgcggcctgctggtcggggtcacttcgctgaccgcctgggtagtgtcgtttattccgcgcggcgtcggcagggatccgaccttgggtcaacaagaaaccgtgggttagctgcgagttcaaccgcccgctcactcgcccggtgaacaggctccaacattgatgatgatacgatgacgagaaaaataacctggttaactgctctggccttaggcatcagcaccctgtcgcaggccgaaaccgccaccgcgccgaccgtggcggcccagccgccgatcgccgcggcggccgatacggcgaccgcgccgcaggatccgaatgcgccggtgcgcgacgtgtcgctgccgttcgcgcagatagcgccgccgccgggcacctttgttctgcgcggcacccggccggacgggcagatcgagttcggcgtgcgcagcgatgaggtggtctcgcaggcgatgctcgacctggaatttacgccgtcgccggcgctgatcccggtcgagtcgcacgtcaaggtctatctgaacgacgaactgatgggcgtgaccacgatctccaaagagcagctgggcaagcccaatcgcatccagatggcgatcgatccgcgctatatcaccgattttaaccgcgtccggctggtgttcgtcggccattatcagaacatctgcgaaaacccggccagcacttcgttgtggctcgacgtcagccaatccagcgcgctgaagctgcgtttccagacgctgccggtgaaaaacgagctgtcgcacttccctgagccgttcttcgacagccgcgacaatcggccgctgacgctgccgatggtattcgccggccagcctgatctcgcccagcagcgcgcggcgggcattctggcctcctggttcggcagcaaggcgcagtggcgcgggcaatccttcccgacgctgtacaatgcgctgccggcgcagcacgcggtggtgttcgccaccaactcacagcgcccggatttcctgcgcgattatccggcggtcaacggcccgacggtggagatgatcagccaccccgacaatccgtacgtcaaactgctgttgattcaggggcgtgacgacaacgatttgatcaccgcggtgaagggtatcgcgcagggtaacatcctgttccgcggccagaacgtgacggtggacaaggtggaacagctcgcggcgcgccagccttacgacgcgccgaactgggtgcgcaccgatcggccgatgaccttcgccgagctgcagcaatatgccgaacagctgcaaaccagcggcatcgaacccggcccgatttcgctgaccatgaacctgccgccggatctgttcctgatccgcagcaccggcatcgacatgcacctgaaataccgttataccgcgccgcgcattcaggacggttcgcggctgagcgtcagcctgaacaaccagttcgtgcaggcttactcgctggtgccggaacacgagcagggcgcgcagctgctgcgactgccgctgacgcaggggctgctcgactctgacaggaacgtcagcatcccggcgttgcggctgggcgccaccaaccagctgcgctttgactttgactacaccacgctgctggccagcggcgcggaagggcgctgcgaaacctactccttcacgcaaaaccacgcggtgatcgacggcgcgtccaccatcgatttctccggctatcgccactttatggcgatgccggatttgcgcgccttcgccaacgccggcttcccgttcagccgcctggcggatctgtcgcaaacgctggtgttggtgaaccagaaaccgcagccggcgcaggtcagcgcgctgctgaacgcgctcggcgtgatcggcgcgcaaaccggctacccggcgctggcctttacgctgagcgacgactggtcgcaggccaaggatcgtgacgacgatatcctgatgatcggcaccattccgccggcgctgcgcgacgacaagaaaatcagcctgctggtggacgccactcaaagctgggtgaagcagccgacgcgccaaccgccgttgccgagcgcggaattgctggcggaggacgccaagccggacagcaaaaccaccgtcagctccgagggcgcaatgtcggcgatcatcggtgtgcaatcgccgttcaacgatcagcgcagcatcgtggcgctgctggcggacagcccgcgcggctatgagttgctgaacaatgccctgctggacagcggcaagcgcgccgcggtgttcggctcggtggcggtgatccgcgaatcgggggtcaacagcctgcgcgtcggcgatgtttactatgtcggccacctgccttggtgggagcggctgtggtatgccctctccacccatccggtcctgctggcggtgctcgcggtggtgctggtggtgatcctggggctgatgctgtggcgcggcctgaaggccttcagccggcggcgtctggcgcctgaagatcgggattgacggcggtgaacgcgatgctgcaacgcctgtcgctcggcatgctgctgctgtgcgctttcagcgcggcggcggcctgcgagtggccgggctggcaacagtacaagcagttctacatcagcccacagggacgggtgatcgacccgagcagcccgaacaaaatcaccacctctgagggccagagttacggcctgttcttcgccctggtggccaatgaccggccgaccttcgaccagctgttgacctggacggagaacaatctggcggcgggcgatctcagcgcccgtttgcccgcctggctgtggggcgagagcgacgataagcagtggaaggtgctggacgccaactcggcgtcggacgccgatctgtggatcgcctacaacctgctcgaagccggccgcctgtggaaaagccggcgttatcaaaccctggggacgctgctgctgcaacgcatcggccgcgaggaagtggccgacattcccggcctgggcctgatgctgctaccgggcaaagtcgggttcgtggcggaagatcgctggcggctgaatcccagctacctgccgccgcagctgttggcgcgttttgcggcgctgaacggcccatggcgcgcgatgcgcgaggtcaatcaacggctgtggctggacaccgcgccgcacggtttctcaccggattgggtggtgtggcgggtcggtgccggttggcagccggacaccgtcaagccgaacgtcggcagctacgacgccattcgggtttatctgtgggccggcatgctggcggacgacgatgaacacaaggcggcactgcttgaacgcttccagccgatggcgcagttcactgccaaacagggcgttccgccggagaaaaccgataccgccagcggcaaaaccaccggagacggcccggtcggtttctccgcttctgtgctgccgatgctggcgacgcaggctgaagcgctggcggtgcagcggcagcgcatcagcgagcacccgccgggtgacgacgcctatttcagcgcttcgctgacgctgttcggtcaggggtgggatcaacaacgttatcgctttaatcgtcagggtgaattgcaaccctcgtgggacggccaatgcacaacttcaaaataaactggctgaatttgattccgctgagcctggcgatgctgccgcaggcgcgcgctgcggaggccgtggccccggaacagtggctgctggaacaggtgcgcattggcgaggccggcaacaaggacgatctggtgcgccagtcgctgtaccggctcgagctgatggatccgaacaacccggacgtgatcgccgcgcgcatgcgtttggcgctgcggcagggcaacctggcgctggcgcagcagcagctggacaagctgaaaaccctcgcgccacagtccagcgcctatcgccaggcgcaaatgaacatgctgctgacccagccggaaacccggcaaaagctgcagcaggcgcgtctgatggcgaccgccggccggttgccggaagccaaggcgcagtacgatgcgctgtttcacggcgagccgccgacgctcgatctggcggtggaatactggcggctggtggcgcgtttgccggggcaggaggcgaaggcgttaaagcagctgcaggcgctggatcagcaatattcaggcaatgtggcgctgcgtatgtcgctggcgcgtatgctgttcagtcagaaccaggacgcgcaggcctatgaactgctgcagaagatcgccgccgatccggccgggcgcggcgatgccgccgatctgtggctggacaaggtcaaagcgatgccggtcagcgcgcagagcgtggcggcgctcaaccgcttcctcggcgtgttcgacactggcgatcaggcgaccagcgcccgcgaagagctggccagacagcagaaattgttggccgatccggcctatcaggcgcgggtgcgcggcctggcgcaggtggataaaggcggcagccgggcagccattcctgagttgcaaaaggcgctggcggcggcgccgaacgacgccgaggtgctgggggcgctcggccaggcctactcgcgcgccggcaaccgcccgcaggcgctgaagctgtttcgccaggcgctggcggccgacaagaacggctacgacagcggcaagtggcagagcctgatcaaaagcaccagctactggctggcgatcgacgagggcgacaaggcgctgaaggccggcaatctcgcgctggcccggcagaaatatcagcaggcgcgccagctcgacgacagcgacggcgatgcgttcatcggcctgggcgatgtggcggtggcgagcaaggatgacgccgcggcggaagggttttatcagcaggcgttgcgacgcgatcccggcaacggcagcgcgctgcgcggcctggtgaatatctatcagcgccagtcgccggaaaaagcgctggcctacctcaacggcctgccgcgcagccaacaggccaagctgcgcagcaccctcgacggactgcggctcgatatgttgaagcagcaggcggagacgctggcggcacagcagcagtggcggcaggcggcagaaatctatcgccgcgctcagccgatggatcccgacgacgtctggctgacctatcgctatgcgcaggcgctgcgtcaggccgggcagccgcagcaggcagacgctctgttccggcagctggcgcagcgccaacatgccaatccgcagctgacctacgcctatgcgctctatctttccggcagcgatcgcgacaggcaggcgctggcacaactcaatacgctgcctgcggcacagtggaacgacaacatgcgcgagctggcgcagcggctgaaaatgcaggcggtaatcgagcatgccgaacggctgcgggcggccggtgacgaaccggcggcggaagcctatctgcgccggcagccggcggacacgcgcatcgatttgctgctggccgactgggcactggcgcgcggggagtatgcggcggcgctggacgactatcagcgggtgaaacggcgtgagccgaacaacccggatgcgcagctgggcgagatcgaagcctatgtggcgcagggggatctggacgcggcgcgtcaacggcttaaaaccgaaccgcagccacaagacgcttcgctcaacagccagcggcgagtcgccaacgcctggggggcggtcggcgatccgcagcaggccgaagctatcttcggccgactgaaaacggcggcggcttcggagcccgtcggacagaccaaggcgctggtttaccgtgacgccgcccggctggagcgggctcagcaacagcctgagcgggcgcagcaggattaccgccaggcgatggtggccagcggcattacgccgacgctgccgcaggataatgacagctacacctatttgacgcgcaataatccgagcgacgactggctgaaacgcggcatccgctccgacgccgcggatctgtatcgacagcaagacgtgaacgtcacgctcgatcacgattactggcgctcgagcggcaccggcggcatctccgacttcaacgcgcacgacaccatgctgcaggtggacatgccgctgcatgacgggcgtgccttcttgcgcaccgacaccgtgcagctggatgccggccgcttctcgaccgacggcagcggcaaatactacgaaaccttcggcacctgccacacgcaagggtgccgcggcgatgaacatcagaaaaccaccggcaccagcgtggcggccggctggaaaaacgatcgctgggccgccgacatcggcacgacgccgatgggctttgaggtggtcgactggaccggcggcctggcctacagcggcgactggaaccacattggttggacgctggcggcctcgcgacggccgatctccagctcgctgctggcgttcggcggcgccaaagacccgaataccggcatcacctggggcggcgtgcgcgctaccggcgtcagcctgagcgccagctacgatcgcggcgaggcgaacggcgtctgggccgatctcagcgcgcaccagattaccggcaagaacgtggcggacaaccagcggcagcggttgatggccggttactactacaagctgatcaacgaagacaatcgccgcctgagcgtcgggctcaataccatgctgtggcactaccagaaggatttgagcggctattcgctggggcagggcggctattacagcccgcagcaatatctgtcgctgtcgctaccggtcaactaccgccagcgcaccgagaactggtcgtgggagctgggcggttcggtttcgctgtcccattcgaagaccgacagccagcgccgctatccgctgcaggggctgatcccggattcgttgcccgataagttcgccgtcgaggacggcagctcttcgagcggcgtcggttataccctgcgggcgatcgtcgaacgccgtctcagttcgcactggacgctcggcgccggcatcgatatccaacaggcgaaggactatacgccgagccacgcgttgatttatctgcgttattccctggccggctggcaaggggatctcgatttgccgccgcagccgctgacgccatacgccgacttcaagtagccgggaggggaagattcggagtgtcggacaccggggagttttgttaccctgtgtccgggtcgcgtttgtccgctttaggaaaagactgaaacccgcgattttcttggttttgcctgcggcatagccagataaaaacagccgatgatcgagtatactcagcccggttcgagggggcgggtgagagtcagccccctttttgtttcagcccgatttcacggagagcaggtttgcgggtcaggcgttcgttaacgattaagcagatggcgacagtgtccggcgtggcgctggtcacgatctgcatttttatcgtgatccagttattccactttgtgcagcagcgcagggatgactacgcccagcaactggagaatatcgctcattccgtgcgccagccgctggcggaagcggtgctgcgcatggacgtgccggaagccaaaaaggtgctgaacacgctgttgccggtcggcattctcagccgggcggatatcgtgttgccgaacgagtttcaggcgctgcacgccaatttcccgccggagcggccggtgccgacgctgatcgcccggctgtttgaactgcctatccaaatttccgtgccgctctattcgctggagcgggtgcccgccaaccagcagccgctggcctatctggtgctgcaggccgattcgttccgcatgtaccagtttatcctcagcattttgtcgaccatgctgtcgacctacctgctgctggcgctgatcctgtcggtggccatcacctggtgcatgaaccggctgatggtgcatccgctgcgcgcgatggccaaagagctggagaacatctcgcaggacgaagcgccctatcaccagctgatgctgccggcgctgcaccaggacgacgagctcggcctgctggtgcgcaattacaaccgcaatcaacagacgctggccaaggcgcatgccgatatgagccgcctgagcacccgccacccggtgaccgaactgccgaatcctgcattgctgaacgcgttgctggaacagcatatcgcctccagtctgcgccctgagcgttttaacctgctggtgatcggcatcgagacgctgcatgaagcgtctggcgtgatgagcccggcgatgcgtgaagcgctgctgctggcgctggcgaagaagctgcgcggctgcatcgacgaaaacggcgtgctggcacagctgagcaataccgaattcgccattctggccaagggcattgagcggccgttccacgccatgcagctggcgcggcgcatcatggcggagatcaatgcgccgttgacgctggaaggtctggcgctgcggcccaacgccagcatcggcatcgcgcactacctcaatcagggggagagcgcggaacagctgctgcgcagcgccacctcggcaatgatgtccgcgcaccgcgaaggaaaaaatcagatcctgttcttcgaacccagcctgacggaacgcacgcagaagcggctgacgcaggagagtgagatcctgcacggcatcgagcagcggcatttcacgctgttcctgcagccgcagatcgacatgcagtccaacgaggtgatcggcgccgaagcgctgctgcgttggcaacagtatgacggcagctataccctgccggccgacgttatcccgctcgcggaagagctgggcgtgatcgtgcctctcggcaactgggtgctggaagagtcttgccgtatcctggcggactggcagcaacgcggcattgcgctgccgctggcggttaacgtttccggtattcagatgcaggatgaagcgttcgtcccgcatctgaaaaacctgctggcgcagtatcggatcgatccgcgcaagctgctgctggagatcaccgagacggtacgcatcgacgatctcgatcgcgccctggcgctgctgcgcgagttgcacgacctggggctgtcgatcgcgctggacgacttcggcatgggctactccagcctggagtacctcaaccgcttgaaatccctgccgatcgatttgattaagatcgaccgcagtttcattcaggggctgccgggcgacgatgcgatggtgcgcatcgtcagttcgatctccgaagtgctggcgttgccggtgatggccgaaggcgtggaaaacgccgaacagcgtgactggctgctgcagcacggcattcgcagtgggcaaggattcctgttcgctcggccgctgccgcgcgaagcgttcgaagccgagttttgccgcgcggcgccgtgagcgtcgcgatacctttccggtacttttcctcgtccgaaaatcgccattctttatctacctcttttgcgttagtgcaaacaaaggcttacgcaattttcagctttgcaccccgactgacgcgtttcagctcttaaattcacatcaaccccacacggtgggtgcaacaaattatttccatgttgttaagtgggtgttattttccgcgcaagcgatgaacaggctggatttttagactgctgcctggtgcgtgtcttccccccataggatgttcatatgaaaacaacgatctttaagagcctctattttcaggtgctgacggcgatcacgctgggtatcctgcttggccatttctaccctgaccttggcgccgagatgaaacctctgggcgatggcttcgtcaaactgatcaagatgatcatcgcgccggtgatcttctgcaccgtggtgaccggcatcgccggcatggaaagcatgaaggcggtggggcgcaccggcgccatcgcgctgctgtattttgaaatcgtcagcaccattgcgctgattatcggcctggtgatcgtcaacctggtgcaaccgggcgccggcatgaacgtcgatcccggcacgctggacgccaaagcggtggcgatctacgccgagcaggcgcagcagcagggcatcattccgttcctgctggatatcatccccggcagcgtgatcggcgcgttcgccagcggcaacattcttcaggtgctgctgttcgcggtactgttcggcttcgccctgcatcgtctgggcgacaaagggcagctgatctacaacgtgatcgacagcttctcgcgggtgattttcggcatcatcaacatgatcatgcgcctggcgccgctgggggccttcggcgccatggcgtttaccatcggtaaatacggcgtcggcacgctggtgcaactcggccagctgatcgtgtgcttctatatcacctgcatcctgttcgtggtggtggtgttgggcagcatcgcccgcgccaacggcttcagcatcttcaaattcgtcaactacatcaaagaagagctgctgatcgtgctgggaacctcgtcgtccgaatccgcgctgccgcgcatgctggataaaatggagaagttgggctgcaagaaatcggtggtgggtctggtgatcccgaccggatactccttcaacctggatggcacctctatctacctgaccatggctgcggtgtttatcgctcaggcgaccaacacccacatggatatcatgcatcagattaccctgctggtggtgttgctgctctcctccaaaggggcggcgggcgtgaccggcagcggctttatcgttttggccgccaccatctccgccgtaggccacctgccgctggccggcctggcgctgatcctcggcatcgaccgctttatgtcggaagcccgcgcgctgaccaacctggtgggcaatggcgtggcgaccgtggtcgtggccaaatggtgtaatcagctggatgagaaacagctgaaagacaccctgaacaacaaaaataccggcgcggacaaaacgctgccttccgcctgatttcggcggtaaatcaccggccgcagccgcggccggtgagcttcttcccctgcctcgtaacgattttttgcattaaaaaccccgcaatctattatttttcactctaatgagtgacatccgcaaaggcgcgcggtctaacacgatggtacactttctgctttccgccccactgtgaaactcagggcgtatttttatgattccattgaatggaatacacgcatttgcataagaaattggatagtcattaagtaggggttcacatgcagggcaccagaattcatcttatagttggtgggctgctactggcggcagccagtagcagcgtgcaggctgaagcactacaacccgatcctgcctggcagcagggggcgctggccaacgggttttcatggcagattctcgatacgccgcagcggccaagcgaccgcgtggaactgcggctgatcgtcaataccggctctctggtggagtcttcgcagcagaccggtttcgcccatctgctgccgcggctggcgttggcgcgcagcgaaagctttaccgcgccgcagctgcgagccctgtggcaacagagcgtggataacgagcggccgctgccgccggcgatcatctcgtatgatttcaccatgtataacctcagcctgccgaacaaccggcccgacctgctgaaagaagcgctggcctggctggcggacaccaccggcaaactggcgatcgacgagcatacggtgcacgcggtgatgaattccagcatcaatccggtcggcactttcccgcccaatacccaagatgcctggtggcgttaccgcctgaaaggctcgacgctgctggcgcacgatccggcgcagccggcgaaacggccggtcaacctcgagcagctgaagaaattctatcagcagtggtataccccggacgccatgacgctgttcgtggtcggcaaggtcgacagccgcagcctgggcgagcagatcaacaaggcgttctcgccgctgcagggcaaacgtgaaaccccggccccgatgccgaccctgacgccgctgccgcagcagccggtgagcctgatcagcgagcaggtgaaacaggatacgctgtcgatcatgtgggattcgccgtggcacccgattcgcgattcgcagagcctgctccgttactggcgtggcgatctcgcccgcgaggcgctgttctggcatcttcagcagacgctggaaaaaagcgaccagaagagcctgcatctgggctttgactgccgcgtgcagtaccagcgtgggcagtgcgccatccatctggatacgccgaacaacaatctgaacggcagcctgggctttatcgcccgcgagctggccaacgtgcgtgataacggtctgtcgaaagaggaattcgatgcgctgctggcgcagaaaaacgatcagctgagcaagctgttcgccacctacgcccgcaccgacaccgatgtgctgatgagccagcgcctgcgttcgcagcagagcggggtggtggatatcgcgccggagctgtatcagaaactgcgccaggaattcctgtccagcctgacgctggagacgctgaatcaggcgctgaagctgcagctgtctcaggaggcgaccctggtgctgatgcagccgaaaggtgagccggaaatgagcatgaagcagctgcaggaaacctatgacggcatcatgatgccggcgccggcggtggtgacggaagaagccaaaccggccgacaccgcggtggctgcgccggtgacggacgccggcgcgcagtaattcgcagcagggggcgcaggccccctagttacggtacagcaccttgatgatgtggtaaccgaactgggttttgaccgggccgtaaggtttgagcagcgggatgctgaacaccgctttatcgaacgccggcaccatcgcgcccttgttgaattcgcccagcgagccgccgttgcgttttgacgggcagctcgaatatttgcgtgccagcgtgtcgaagctgacaccgcgcttcagcttggccagcagctcgttggccagcttttcattgtctaccagaatgtgcagggcgcacgccgtttttgccatggtattgcctttgtcgatgcgaaaattgcgctgattatacccgctaaatctcatcggcgctttctgctacaattcccttccacgttttacagttgagcaagccagcaccatgcgattaaaccccagccaacaacaagccgtcgaattcgttaccgggccctgcctggtgttggccggcgccggttccggcaagacgcgcgttatcaccaacaagatagcccacctgatccaccactgcggctatcaggcgcggcacatcgccgccgtgacctttaccaacaaggccgcacgcgagatgaaagagcgcgtgtcgcaaaccctggggcgcaaagaggcgcgcggactgatgatttccaccttccataccctggggctggagatcatcaagcgggaatacgtggcgttggggatgaagtccaacttctcgctgttcgacgatcaggatcagctggcgctattgaaagagctgaccgaaaagtggctggaaagcgacaaaacgctggtggcgcagctgatttcgaccatctccaactggaaaaacgacctgatcgatccccagcgggcggcagagttggcgcgctcggaacgcgacaagctgttcgcccactgctacggtctttaccacgcccatatgcgggcgtgcaatgtgctggacttcgatgacctgatcctgctgccgacgctgctgttgcaacgcaacgaagaggtgcgcgaacgctggcagcagcgcatccgctatctgctggtggatgagtatcaggataccaacaccagccaatacgagctggtgaagctgctggtgggcaaccgcgcgcgctttaccgtggtgggcgacgacgaccagtcgatctactcctggcgcggcgcgcggccgcagaacctggtgttgctgaaggaagatttcccggcgctgcaggtgatcaagctggagcaaaactaccgttccagcgagcgcattttgaaggcggccaacattctgatcgccaataacccacacgtgtttgaaaagcggctgttttctgagctggggtatggcgaagagctgaaggtagtgaccgccaacaatgaggatcacgaagccgagcgggtggtaggggagcttatcgcccaccacttcgtgaaaaagaccaattacggcgactatgcgatcctgtaccgcggcaatcaccagtcgcgggtgtttgaaaagatgctgatgcagaaccgtatcccgtacaagatttccggcggcacctcgttcttctcgcgccccgagatcaaggatctgctggcttacctgcgcgtgctgaccaacccggaagacgacagcgcctttctgcgcatcgtcaatacccccaagcgtgagatcggcccggcaacgctgcagaagcttggcgagtgggccaaccagcgcaacaaaagtttgttccatgccagcttcgatctggggctgagccagcacttgaccggacgcgggctggaatcgctgcagcgcttcacccattggctgggcggcatcgcccagcaggcggaacgtgagccagtggcggcggtgcgcgatctgatccgcggcgtggattatgagagctggctgtttgaaacctcgaccagcccgaaggccgccgaaatgcggatgaaaaacgtcaacacgctgttcggttggatgacggaaatgctggaaggcaacgatctggacgagccgatgacgctgacccaggtcgtgacgcgcttcaccctgcgtgacatgatggaacgcggcgaaagtgaagaggagctggatcaggtgcagctaatgacgctgcacgcctcaaaggggctggagttcccttacgtgttcctggtgggcatggaagaggggctgctgccgcaccagagcagcatcgacgaagacaatgtcgatgaagagcggcgtctggcctatgtagggatcacccgcgcgcaaaaagagctgattttcaccctgtgccgcgagcgccgtcagtacggcgagctggtgcggccggagccgagccggttcctgctggagctgccgcaggacgatttggcgtgggaaaccgaacgcaaagtggtgagcccgcaggagcggatgcagaaggggcagagccatctggccaatatccgcgcccagctggccaaggccaaaggcgggaattaaaaagaaagggcgcgattcgcgccctggtcatgtcaacgttgttcttccaaccgcagcgtccagtggacgtagctctgccagtggctttcctgctccagcgcctcggcgcgcagcggatgctgttccagccagcccggcggcaagatcaccgtcagttcatcgtcctgattggcgcgtaaccgcaccgccggcagcgtgtcgtcgcggcggcggctggcgaagatgatcgccaggcgcaaaatgcggcacaggcgctgcgcagtgcgcggcggcagggcgttttgctggttcaacagcgacaggtcgagggtgttgctctgattttgcagcagggtggccagcagttttttctgcgccggggtaaagccgggtaagtccaggtggcggatcaggtaggcggcgtgttgcggcgcctgcttgaaatcgacgctgaggccgagttcgtggatcaggctggcgctgtgcaacagctcgcgacatcgcgcatccagctgccactcgttggcgacctgctgggagaagttggcggcgagctggctgacgcgttcggcctgctcggtgtcgatcaggtagcggcgctgcaggttgcggatggtgcggatgcgaatatcctgctccaccggcagatgcagcatgccgtaaaccagaccttcacgcagcgccccgccggccagcatcatgctctcgatgcccagctcctggaagatggccaacaggatggacaggccgctcgggaacaccagcgcgcgctccagcgtcaacccttcgatctccagctcttccagcttgccgcactgaatggcgcgctgtttcagctggcgcagtttgggcagggtgatgcgctcatccatgccctgcgccaccatgatctcctgcagcgcttgcacggtgccggaagcgccgacgcagatctgccaaccttgttggcgcaattgcggtgcgatcggccgcaccatttcgcgcgcggcctgttcggcgcgctcgaagttttcttgcccaaggttgcgatcgctgaagtagcgttccagccaggtgacgcagcccatcgacaggctatacagctgcgttgcctgtgcgccggtgccggtgaccagttcggtgctgccgccgccgatgtcgacgaccagccgacgatccggcccgccggtggtgtgcgcgacgccgtgatagatcagccgtgcctcttcttcgccgctgatcacctgtaccgggcagccgaggatttgctcggcggcctgcaggaactcatcggcgttggacgccagacgcagcgtggcggtggcgacgacgcggatctgctcgcgtggtatgtcctgcaggcgttcggagaacagccgcaggcactgccagccgcgttgcatggcctcatgcgacaggtgattgttctgatccagcccggccgccaggcgcactttgcgcttgatccgcgccagagtctgaatgctgccggccacctcgcgcactaccaacatgtggaagctgttggagccgagatcgatggcagcataaagcgtgctggagctgagcatggcgatcagctcgaacgtttacggttgttgcgcggcgcgccgccgcgacgtggcgcggagttgcgacgtgggccgttgccgccgcgcggacgcgacaggcgcttcggcgccggcaaatcggtcagcagcgcatcgctgttgtacttgctcaccggaatgctgtggtcgatataggtctcgatcgccggcaggttgagcgcgtactcttcacacgccaggctgatggagtggccgctggcgcctgctcggccggtacggccgatgcggtgcacgtagtcttcgcagtcgtcaggcagatcgtagttgaagacgtgcgtgacggaagggatgtgcagaccgcgcgcggcgacgtcggtggcgaccagaatatcgagattgcctttggtgaagtcgtcgaggatgcgcaggcgttttttctgcgccacgtcaccggtcagcaggccgacgcggtgaccgtcggcggccaggtggccccagatgtcttcgcagcggtgcttggtgttggcgaagatgatggcgcgatccggccactcttcttcgatcagtgtctgcagcagacgcattttttcttcgttggacgggtagaacagctcttctttaatgcggtggccggttttctgttccggttccacttcaacatattcggcgttgttcatctgctcgaaggccagttcgcgtacgcgataggacagggtagcggagaacagcatgttcaggcgttgatcggccgcaggcatgcggcggaacagccaacggatgtctttgataaagccaagatcgtacatgcgatcggcttcatccagcacgacgacctgcatcgcgccgagatcgacatagttctgtttggtgtaatcgattaaacggccggtggtgccaatcagaatgtccacgccgctttccagcactttcagctgtttgtcgtagccgtcgccgccgtaggccaggcccagtttcaggccggtgctctgggagagcgcttccgcatcggagtggatttgcaccgccagttcacgcgtaggcgccatgatcaaggcgcgcggctgattggtctggcgatcctgtttcgccgggtgagtcagcaaatagtgaaaagtagacgccaaaaacgccagcgtctttccggtaccggtttgcgcctgacctgcaacgtcacgcccggagagcgtgagcggcaatgctaacgcctggatgggcgtgcaattgtgaaacccttttttctcaagggcttcaaggactaacgggtgcagggcgaagtcggaaaacttctgttcggtcaagtgtgttttgctcatagtgtggtagaatatcagctaactattgctttacgaaagcacatccgttgaaataaacgcggtgcaataaaatcaccttgagttggttaatgctacaccaacaaggtagacataatcctgtggagtagaacatgagcgataaaattattcacctgactgacagcagcttcgaagctgacgtgctgaaagcggaagggccgatcctggtcgatttctgggctgaatggtgtgggccgtgcaagatgattgctccgattctggatgagattgccgaagagttcgaaggcaaactgaccatcaccaagctgaatatcgatcagaacccggctaccgcgcctaagtacggtatccgtggcatccctacgctgttgctgttcaagaacggtgaagtggccgcgaccaaggttggcgcgttgtccaaaggtcagctcaaagatttcctgaacgcgaatctgtaatcgggcgggaagcccagtatcaggcgcctggcggtgatgttcaattcaccgctagacgcctgccaagaagcgtgttaagtttaaccacactgcatatagaacttgcccgaagttttaaatctaaagagtttgaatctaaagctatactctgtgtcgaaccactggcgttgaaagtaaactgaactcagcccgtgttttggcaatcaaacggttttgcaaaaatcatttttaaggtaccttcgatcttcaaccgtcaatgcgtgcgcccgatgtaagccatttcttaccgcgacggctctgcgcccggtgatcgaacgtccagtaaacaggcacgcatttcgctgccataccattcacgatacaagttcgagacataccccgagtttaagaacccaccactatgaatcttaccgaattaaagaatacgccggtttctgagctgattactctcggcgaaaatatggggctggaaaaccttgcccgtatgcgcaagcaggacattatcttctccattctgaagcaacatgcgaaaagcggagaagatatcttcggcgacggcgtgctcgagatattgcaggatggattcggtttcctccgctctggagacagttcctacctcgccggtcccgacgacatctacgtatcccctagccaaatccgccgcttcaacctccgcactggtgacaccatttccggtaagattcgtccgccaaaagaaggcgagcgctattttgccctgttgaaagtcaacgaagtcaactacgacaagccggaaaacgcccgcagcaagatcctgttcgagaacttgacgccgctgcacgccaattctcgtctgcggatggagcgcggcaacggctcgaccgaagacctgacggcgcgcgtactggatctggcggcgcctattggccgcggccagcgtggcctgatcgtggcaccgccgaaagccggtaaaaccatgctgctgcagaatattgcgcagagcatcgcctacaaccacccagactgcgtgctgatggtgctgctgatcgatgaacgtccggaagaagtgaccgagatgcagcgcctggtgaaaggcgaagtgatcgcctcgaccttcgacgagccggcttcgcgtcacgtgcaagtggccgaaatggtgatcgagaaggccaagcgcctggttgagcacaagaaagacgtgatcattctgctcgactccatcacccgtctggcgcgtgcctacaacaccgtggtaccggcctctggcaaggtgctgaccggtggtgtggacgccaacgccctgcatcgtccgaagcgtttcttcggtgcggcacgtaacgtggaagagggcggcagcctgaccatcatcgcgaccgcgctggttgataccggttcgaagatggatgaagtgatctacgaagaatttaaaggtaccggcaacatggaattgcatctggcgcgtaaaatcgccgagaaacgcgtattccctgcgatcgattacaaccgctccggtacccgtaaagaagagctgctcaccacttccgaagagctgcagaaaatgtggatcctgcgcaaaatcattcacccgatgggtgagattgacgcgatggagttcctcattaataagttggcgatgaccaaaaccaacgatgaattcttcgatatgatgaaacgctcataattcgttaaaaaattcgctgaacgccacgcctagtcgtggcgtttttcgcttttggcggatacgataagtagcagtaatggaaaagtaagttgtttcctcgacttattgagaattcatcttgtttgtcggtcggcccggtgccggtcggctttgctgctgtcgttttgtcagccgatgcgaagaaaataggcatgaatcaccgttgtcataggaaatgaccgaaaggtggcgggggtcgatggcacaagctattgcccgtggtaagctgccttatcttctacagagatctgttaactgtgaacttactcactatgagtactgaaattctatttgttttcctgttttctttggcttttctctttgttgcccgcaaggcggcaaaacgtattggtctggtagataaacccaattatcgcaaacgccatcaggggttgattccgctggtcggcggtatttccgtttatgccgggttgtgcttcgcgttttggatttccgaacaacctatcgcgcacgccaagctttatctcacctgcgccggcattctggtgtttgtgggcgcgctcgacgatcgtttcgatatcagcgttaaaatccgcgccctggtgcaggcgctggtcggcatcgccatgatggtgttcgccggtctgtatctgcgcagcttcggccatgtgctgggtgactgggagatgctgctggggccgttcggctatctggtgacgctgttcgcggtatgggcggcgatcaacgccttcaacatggtcgacggcattgatggcctgctgggtgggctgtcgtgcgtttccttcggggcgctgggcctgctgctgtacctgagcggccatcatgagctggcgttctggtgctttgcgatgatcgccaccatcgttccctatattttgctcaacctcggcatcctcggccgccgttataaggtgtttatgggggacgccggcagcaccctgatcggctttaccgccatttggctgctgctgcaaagctcgcagggtaaggcacactcgatcaacccggtgaccgcgctgtggatcatcgctattccgctgatggacatgatagcaatcatgtaccgtcgtttacgcaaggggatgagccccttctctcccgatcgtcaacatattcaccacctgatcatgcgcgccggctttacgccgcggcaggctttcgtgttgatcaccctggcggccgcattgctggcggcggtgggcgtgatcggcgaacgcctgacttttatccctgagtgggttatgttggcattatttttgcttgctttcttcctgtacggttactgcatcaagcgcgcctggcgggttgcgcggtacattaagcgtatcaagcgccggctgcggcgttcgagcgataacaagcaagtatcttaaccagaggctttttggctgtgatgaatccagaaacaacgtctgacaagcataccccggcggtggataacgaactcgatatccgcggcctgtgctgcaccctgtggcgcggcaaaccgtggattatcggcattgcggtgctgttcgcggcggtcgcgctgatcgtttcttacctggttaagcaagagtggagcgcgaccgcaatcaccgacaaacccacggtgaatgcgctgggtggttactattcccagcagcagttcctgcgcaatctggacgtgcgcacgctgccggcgatggccggcgatcagccgagcatcgcggatgaagcgtacaatgagttcatcatgcagctggcggcttacgacacgcgtcgcgatttctggctgcagagcgattactacaaacagcgtcaggaaggggatgcccgcgccgatgcggcattgctcgacgagttgatcaataacatcctgttcacgccgcgcgacgacaaaaaagtcccgaacgacggcgtgaagctgacggcggaaaccgccgcagacgccaaccgcctgctgcgccaatatgtggccttcgccagccaccgcgctgccctgcatctgaacgaagagattcagggggcgtgggccgctcgcactacttcgatgaaggcacaggtcaagcgccaggaagcggtggcggagtcggtttacaagcgcgagctgaacaccacgcagcaggcgttgaaaatcgccgaaagccaggggatcagccgcacgcaaaccgacaccccggcagaacagttgccggattcggatctgttcctgctgggccggccaatgctgcaggcgcgtctggaaggcctgcaggcctccggcccgacctacgatctggattacgatcagaatcgcgcaatgttggcgacgctgaacgttggcccgacgttggatgagaagttccagacctatcgttatttgcgcacgccggaagagccggtaaaacgcgacagcccgcgccgggtattctggctgattctgtggggcgcgatgggcgctttggttggcgcgggtgttgccctggcgcgtcggccgcgtagttaaaaaataatataataatctgatgcagggcgcgtgagcgccccattcgcaggcggggcctgcgattaaccgaccaaaagagattcgctgtgaaagtgttgactgttttcggcaccagacctgaagccattaaaatggcaccgctggtacatgcactggcccaggatgaggcctttgaagcaagagtctgcgtaacggcacagcatcgtgagatgttggatcaggtattgcggttgttcgagatcacgccggattacgacctgaacatcatgaaacccggccaggggctaacggaaatcacctgtcgcatcctggaagggctgaaaggggtgctggaagacttcaaaccggacgtggtgctggtgcacggcgataccaccaccacgctggcgaccagtctggcagcgttctatcaacgcatccccgtcgggcatgtcgaggccgggctgcgtaccggcaatctgtattctccctggccggaagaggccaaccgaaaactgaccggccatctggcgatgtaccacttcgcgccgaccgagaactcgcgccaaaacctgctgcgcgagctgctgccggacaaccgtatttttgtgaccggcaatacggtgatcgacgcgctgttctgggtgcgcgatcgcgtgatgagcgatgctgcgctgcgcgccagcctggcgcagcgttacccgttcctcgatgccgacaaaaaactgattctggtcaccggccatcgccgggaaagttttggcggcggttttgagcggatttgcagtgcgctggcggagatcgcccgcagccacccggaagtgcaggtggtgtacccggtgcatctcaatccgaatgtcagcgagccggtgaatcgcattttgaaaggcatcgacaacgtcatgctgatcgagccgcaggattatttgccgtttgtctatttgatgacccacgcttacatgatcctgaccgactccggcggcattcaggaagaggcgccctcgttaggcaagccggtgctggtgatgcgcgacaccaccgagcgcccggaagcggtagatgcgggcacggtgcgcctggtcggcaccgatgtggccaaaattgttgaagcggtgacccggctgttgacggacgaaagcgaatatcacgcgatgagccgggcgcataacccatacggcgacgggcatgcctgtcagcgtatcctcgaagctttaaagaatcatcaggtgacactatgagttttgacactatttcggttatcggcctgggttatatcggcttgccaacggcggcggcgtttgcttcccgcaagaaaaaagtggtgggcgtagatgttaaccaacatgcggtagataccattaaccgcggcgcgatccatatcgtcgagccggatctggacaaagtggtcaaggacgccgtcgacggcggtttcctgcgggcggtgaccaaaccgctggcggccgatgcgttcctgatcgcggtacctacgccgttcaagggcgatcacgagccggatctggcttatgtcgaagcagcggcgaaatcgctggcgccggtgctgaaaaaaggcgatctggtgatcctggagtccacctcgccggtgggcgccactgaacaaatggcggactggttggcgcaggcgcgcagcgatctcagcttcccgcagcaagcgggcgaagcggcggacgtgaatatcgcctactgtccggagcgcgtgttgccggggcaggtgatggtagagctgattcaaaacgaccgagtgatcggcggcatgacgccgaagtgctcggaacgagccagcgcgctgtacaagattttcctcgagggggaatgcgtagtcaccaactcacgcactgccgagatgtgcaagctgacggaaaacagcttccgcgacgtgaatatcgcctttgccaacgaactgtcgttgatttgcgccgaacaggggatcaacgtctgggaactgatccgcctggcgaaccgccatccgcgggtgaatattctgcagccggggccgggcgtaggcggtcactgcatcgccgtcgatccgtggtttatcgtggcgcaaaacccgcagcaggcgcgtttgattcacaccgcgcgcctggtgaacgacggcaaaccgctgtgggtggtcgaccgggtgaaagcggcggtggccgattgcctggccgccaccgacaagcgcgcgtccgaggtgaaaatcgcctgcttcggcctggccttcaaaccgaatatcgacgatttgcgtgaaagtccggcggtggaagtggcgcacctgatcgccgaatggcacgtcggcgaaacgctggcggtggaaccgaacgtcgaacagttgccgaagtcgctggcgggccacgtgacgttgacgccaatcgctgaggcgttgcagcaggccgatgtgattgtgatgttggtcgatcaccaacagttcaaggccatccggccggaagagatcaagcaaagctgggtggtggataccaagggagtctggcgttgaagcgtatcttagtcaccggcggcgccggtttcattggctccgcagtggtgcggcacatcatcgaagccaccggcgacagcgtggtggtagtggataagctgacctatgccggtaacctcgagtcgctggcggtggtggccgacagcgagcgctatgctttcgagcaggtcgacatctgcgatcgtgccgagctggaccgggtatttgcacgctatcagccggacgtggtgatgcacctggcggcggaaagccacgtcgatcgttctatcgacggcccggcggcgtttatcgagaccaacgtggttggcacttacacgatgctggaagcggcgcgccattactggcagccgttggcggcggagaagaagcagtctttccgcttccatcatatctccaccgacgaagtgtacggcgacctgcacggcaccgacgatctgttcaccgaaaccacgccgtatgcgccgagcagtccgtattccgcctccaaggcatcgagcgatcatctggtgcgtgcctggttgcgcacctacggtttgccgaccctcgtgaccaactgttcgaacaactacggcccttatcacttcccggagaagttgattccgttggtgatcctgaatgcggtagccggcaaaccgctgccggtatacggcaacggcgcgcaggtgcgtgactggttgtatgttgaagatcacgcgcgcgcgctctatcaggtcgtgaccgaaggcgtggtaggcgaaacttacaatattggtggccataacgagcgcaagaatatcgaagtggtgcagaccatttgcgatctgctggaagaattggcgccaaataaaccgcagggcgtgacgaactaccgcgatctgatcacttacgtgaaggatcgcccaggccacgatatgcgttacgccatcgacgccggcaaaatcgatcgcgagttgggctggcggccgcaggaaacgtttgaaagcggcattcgcaagacggtcgcctggtatttggctaacgaaacctggtggcgccgggtgcaagacggttcttatgccggtgagcgtttggggttgtcagattaatttaacgccgcgtcgctttgcggcggtgcggcgggttttggagtaagtatgaaaggtattgtgctggctggcggttccggtacgcgtctgcatccgatcacgcgcggcgtgtccaagcaactgctgccgatttatgacaagccgatgatctattacccgctgtcggtactgatgttggcagggatcaaagacattctgattatctccacgccggaagatctgccttctttcaagcgtttgttgggcagcggcgaagcgtttggcatcaatctcagctatgccgagcagcctagccccgatggcctggctcaggcatttctgattggcgaagaattcttggccggcgagccgagctgcctggtgttgggcgataatatttactttggtcaggggttcagtcccaagctgagaagcgttgcggcgcgcaccgccggtgccacggtatttggctatcaggtgatggatcccgagcgtttcggcgtggtggagtttgacgaccacttccgcgcgctgtcgatcgaagaaaagccggttaaaccgaagtccaattgggcggtgaccggattatatttttatgatgctcaggtggtggagttcgccaagcagatcaagccgtcagctcggggagaattggagatcaccagcatcaaccagatgtatctggagcgtggcgagctgaccgtcgagctgctggggcgcggttttgcctggctggacaccgggactcacgacagcctgctggaagccagtagcttcgtgcagacggtagagaaacgtcagggctttaaaatcgcctgtcttgaagagatcgcctggcgcaatggctggctggatgatgagggcgtgaaacgcgcggctcagacgctggccaaaacaggttacggcaaatacttactggatttattgcatgcacgtccacgccagtattgaaccgctgaattgggagagcgacttcttccaattgaagagcgccaagttgcatttcgacgactctgcggcccccgtgagcaacgctgatttggatgcttatgcgttggtgcaggctaaaatccccgcttaccgattggagtgggccgatgcactgtcggcgctgggcttccggctggtcgaaggcgaagtggatctggccgtgaacattgcaactggacgcgagacggtcgataccgctgcggccggggtgcgcatggccgtgcccgaggacatcccgtcgttgcgggctgccgccggtgacgtgttcgccgccagccgatttcgcgcaccgtggtacgagcgcaccgatagcgggcgattctatgcggcctggatcgaaaaagcggtgctgggcaccttcgatcatcaatgcttgctggtattgggtaaccaggggcaacctgaaggctttgtcagcctgcgcgacattggcggccaggaaatgcgtatcggcttgctggcggcctaccccggcgcatcaggccggggcattggttccagactgatggcgacggcgctggccgaatgtcggcggcaggggatgcaacgcctgcgggttgcgacccaggtaggcaatatcgccgcattacgactctatcaacgacagggtgccgtgattgaaagcaccgcgtactggttatacagaggtagacatgattccatttaacgctccaccggttgttggcactgaactggaatatatgcaggctgcgatgagcagcggcaagttgtgcggcgacggcggttttacccgtcgctgccagcagtggatggaacagcgtttcggcagcgcgaaagtgctgttgacgccttcctgcaccgcgtcgttggaaatggccgccatcctgctggatatccagccgggtgacgaagtgatcatgccgagctttaccttcgtttccaccgccaacgcctttgtgctgcgcggtgccaaagtggtgttcgtcgacctgcgtccggacaccatgaacatcgacgaaaccaaaatcgaagcggcgatcaccgataaaacccgcgcgattgtaccggtgcactatgccggcgttgcctgtgagatggataccatcatggcgctggcgaagaaatataacctcttcgtggtggaagacgccgcgcagggcgtgatgtcgacctacaaaggcaaggcattgggcaccatcggccatatcggctgcttcagcttccatgaaaccaaaaactacaccgccggcggcgaaggcggcgcgacgctggtgaacgatcctgccctgatcgatcgggctgaagtcatccgcgagaagggcaccaaccgcagtcagttcttccgtggccaggtcgacaaatatacctggcgcgacatcggttccagctatctgatgtctgacctgcaggccgcctacctgtggggccagctggaagtggcggaacgcatcaaccagcgccgtttggctctgtggcagaattactacgacagcttcctgccgttggcgcaggccggccgtatcgagttgccgactgtgccggcggactgcgagcacaatgcgcacatgttctatatcaagctgcgtgatatcgacgatcgcaccgcctttatcgactacctgaaggaagctgagatcatgacggtgtttcactatatcccgctgcatgcgtgcccggccggcgaacagtttggccgctttgccggtgaagatcgctataccagccaggaaagcgcgcgcctggtgcgtttgccgctgttctacaatatgtccgatgctaatcaacgtacggtaatcaataccatcctgagcttcttcgcctgatatgtcgttggcaaaagcgtcgatatggaccgccggctccacgctgatcaagattggcgtggggctgttggtggtgaaactgctggcggtggcgtttggccccagcggcgtggggcaggcgggtaactttcgccagttgatcaccgtgctgggcgtgctgtccggcgcgggcatttttaacggcatcaccaaatacgtggcggagtaccaccaggactcgcagcgtctgcgtctggcggtcggcaccgcgtcgagcatcgtgctgggcttttcgaccttgctggcgctggtgtttttgttcgccgccgagccgatcagcatcgggctgttcgggcatgccgattacgtcggcgtggtgcgcgccgtcgccttcattcagatgggcatcgcctacgccaacctgttcatggcggtgctgaaaggttatcgcgacgcgatgggcaacgcgctggcggtgatcggcggcagcctgatcggcgtgatggcttattatctgtgcttcaagctggggggctatgaaggcgcgctggcagggctggcgttggtgccggcgttggtggtgctgccggccgggctgatgctgtggcggcgcaaaacgttgccgctgcgctacctggcgccgcgctgggacaaaggggtggccggcaacctcggcaaattcaccctcatggcgttgatcacctcggtgacgctgccggtggcctacgtgatgatgcgtaacctgttggccgcgcattacggttgggatgaggtggggatctggcaaggcgtcagcagcatttccgatgcctatctgcagtttatcaccgcctcgtttaccgtctatctgctgccgacgctgtcgcggttgacggacaagggcgccatctcgcgggagatcgtgcgctcgctgaaattcgtgctgccggcggtagcggcggcgagctttacggtgtggttgctgcgtgatttcgccatctggctgttgttctcggacaagttcgtcgccatgcgcgatctgtttgcctggcaactggtgggcgacgtgctgaaagtcggggcctatgtgttcggctatttggtgatcgccaaagcgtcgctgcgcttttatatcctgacggaagtcagccagtttctgctgctgacgctgttctcgcactggctgatcccgctgcgcggcgcgctgggggcggctcaggcctatatggcaacctacatcgtgtatttcgcgctctgtagctgcgtgtttcttatttatcgtagacgagtatgaccatactgattcacgttctgggatccgatatcccgcatcataaccagacggtgctacgcttcttcaacgacgtgttggcgccgcgtctgccggctgagcagacgcggcattttatggtggcggccaaggatgtggcggcactgggagatttccccgccctgaacattgagccctacgcggacaagaaaagcctggcggcggcggtcatcgcgcgcgcccaagccgatcgcgatacgcgtttcttcctgcacggccagttcaacccggggctgtggctggcgctgctgagcggcaagatcaaggcgcgtcaggtcagttggcatatttggggcgccgatctgtatgaggacgccaccagttggaaattccggttgttctatctgctgcgccgcattgcgcaggggcgggtagggaatgtgtttgccactcgcggcgacgtgattcactaccagcagcgccatgcgcgggtgccggcctcgctgctgtatttccctacccgcatggatccggcgctgaccgacgttcacgtcgagaaaaacctggccgggccgatgacgattctggtgggcaactccggcgatcgcagcaatcggcatatcgaagcgctgcaggcgattcatcagcagttcggcgccgacgtgcgcgtgatcctgccgatgggttatccggccaacaacgatgcttacatcgagcaggtgcgcgccgccgggttgccgctgttcggcgagaaaaacctgcagctgctcacgcagcaggtggcattcgaggactacctcaatattctgcgcgcctgcgatctgggctatttcattttcaatcgccagcaggggattggcaccctgtgcctgctgattcagttcggcgtgccttttgtgctcagccggcaaaacccgttctggcaggatttggcggaacagcacctgccggtgctgttctacggcgattcgctggacgaggcggtggtgcgcgaagcgcagcgtcagctggcggcggtggataaacaggcgatcgccttcttcaatccgaactatgttgacggctggcagcaggccctggcgctggcggcgggagagcactcatgacgttggcgcaattcggcggcctgtttgtcgtctatctggtcagcctgacgtttatcctgacgctgacctaccaggagtttcggcgcgtgcgctttaacttcaacgtcttcttctcgctgctgtatttgctgacgttctatttcggcttcccgttaacctgcctgctggtgtttcagtttgacgtcgaggtggtgccggtggagtttctgctgtatgccctgctgtcggcgacggcgttttacgccatctattacgtcacttacaagacccggctgcgcaagcgccgcactcagccgcgcgcggcgctgtttaccatgaaccgggtagagactcatatgacctgggtgctgctggcgctggtggcgatcggtaccgttgggatcttcttcatgcagaacggcttcctgctgttcaagctcaattcctacagtcagatcttctccagcgacgtgtccggcgtggcgctcaagcggttcttctacttcttcattccggcgatgctggtggtctatttcctgcggcaggatctgcgcgcctggtttttgttcctggtggcgacggtggcgttcggtattctgacctacgtgatcgtcggcggcacccgtgccaacatcattatcgctttcgcgctgttcttgtttatcggcatcgtgcgcggctggatcacgctgtggatgctggcggcggcgggcatattcggcgtggtcggcatgttctggctggcgttgaagcgctatagcctggacgtcagcggcgcggaagcgttttataccttcctctatctgacccgagacaccttctcgccgtgggaaaacctggcgctgctgctgcaaaattacgacaagatcgatttccagggcctggcgccgatcttgcgtgatttctacgtctttatcccaacctggctatggccgggccggccggacgtggtgctgaactcggccaactatttcacctgggaagtgctgaacaaccactccgggctggcgatatccccgacgctgatcggttcgctggtggtgatgggcggcgcgctgttcatcccgctcggcgcgattctggtgggcatgatcatcaagtggttcgactggctgtatgagctgggcaaaacagagccgaaccgctataaggcggctatcctgcaaggattctgcttcggcgcggtgttcaacatgattgtattggcgcgcgaaggggtggactcattcgtttcgcgcgtggtgttcttctgcattattttcggcgcctgtctggtgctggcgaagttgctgtattggctgttcgataccgccgggctgatcaaggccagagtgacgcgcgcccgcgcgctggcctcttccccacgggcggacggtcttttgtaagggtaatgacgacgatggaaacaaagatttcggtgccgcagtatgagctgcgcggtttcagcctgtggggctttcgcgatatggcgcactgtatggattttctgttcgacggcggccgggtcaaacagggcacgctggtggcgatgaatgcggaaaagatcctgaaggcggaagaggacccggcgctgcatgcgttgctggatgaagcggagtacaagtacgccgacggcatcagcatggtgcgctcgattcgccgcaaatacccggcggcggatgtgtcgcgcgtcgcgggcgccgatctgtgggaagcgttgatgcagcgcgccggccgcgaaggcacgccggtcttcttggtcggcggcaagccggaagtcttggcggaaaccgagcagaagctgcgcagccagtggaatgtcaacctggtgggcagccaggacggctatttcaaaccggatcagcgagaggcgttgttcgagcgtattcgcgccagcggcgccgctatcgtgacggtggcgatgggatcgccgaagcaggagatcctgatgcgcgactgccgcaaggtgcatccgcaggcgctgtatatgggcgtgggcggcacctacgacgtttttaccggccatgtgaagcgtgcgcccaaggtgtggcagaaccttggtctggaatggctctaccgcctgctcagccaacccagccgcattggccggcagttgaagctgttgaagtttgtcggctactactacagcggcaagatgtaacctctcatccggggtggaaagtgctgttccgctccggactgctgtaccaataatctgcttttgcctatttctcccgcatatctataacccccagccctaaacgtcgccgcatttattccataaagttttaaattgcggtttgcttatagcggcgaaatgcgaaacgataccgcccggaaattatccctggccgctgaagcctgatgcgacagcgctgaacgatgttcttctcacggtaacttcgctccgactacccgttgatgccaacccgaacggcaggggatgatttattcttttaataatgacaataacgaccggcagcggccggcaggcaaacacaacccgagaaaaattattgaggatttatggcacacaaagagaaaccgcaagggctacaccgaggccttgaggcccggcacatcgagcttatcgctctcgggggcaccattggtgtcggcctgtttatgggatcggccagtacgctgaagtgggcggggccgtcggtactgctggcttacatcatcgccgggctgttcgtgttcttcattatgcgttcgatgggggagatgctgttccttgagccggtcgccgggtcgttcgccgtttacgcgcataaatacatgaatccctacttcggttatctgaccgcctggggctactggtttatgtggatcgccgtcggcatttctgagatcaccgccatcggggtgtatgtgcagttctggttcccggaaataccgcagtgggtgccggcgctgatcgccgtggcgatggtggcgctggccaacctggcggcggtgcgcctgtatggggagctggagttctggttcgccatgatcaaggtcaccactatcatcgtgatgattctggtggggctgggggtgatcttcttcggcttcggcaacggcggtgaacctatcggtttcgccaatttgacggcgcacggcggtttctttgccggcggctggaaaggcttcctgtttgcgctgtgcatcgtggtagcgtcctatcagggggttgagctggtgggcatcaccgccggggaagccaagaacccgcaggtgacgctgaaacgcgcgatcaacaatatcctgtggcgcatcctgatcttctatgtcggcgcgatcttcgtcatcgtcaccattttcccctggaacggcatcggcactaccggcagcccgttcgtgctgaccttcgccaagatcggcatcgttgccgccgccggcatcatcaacttcgtggttttgaccgccgcgctctccggctgcaacagcggcatgtacagcggcggccgtatgctgtacgccctagccaagaatcgccaactgccggcggcgttgaccaagctttccgccagcggcgtgccggtgaattgcatcgccgtcaccatcggctgcctgctggtgggatctgcgctgaactacattatcccgaatccggagcaggtgttcgtctatgtctacagcgccagcgtgctgccgggcatggtgccgtggttcgtggtgctgataagccagctctatttccgccgcgcccataaggaagcgatcaaaaaccacagctttaagtcgatcatgttcccgtatgtgaactatctgaccatcgcttttctggtttgcgtgctggtcggcatgggaatcaacccggatacgcggatttccctgctggtcggggcgattttcttagcgggcgtcagcctgtgctacttcgctttcggcatgcataagaaacatcatccggctgaaaatcgggtagaaacacggcaataaacggtgaaaagggactacggagtgcgctttcccgcgcaggagtgagcaaagcgtaatcaaacgcaacatttctgcgaaaaagcactagacaggattggcgtaaatccgtagtatcccctcccgcaacggcgctacgcgcccgtagctcagctggatagagcgctgccctccggaggcagaggtctcaggttcgaatcctgtcgggcgcgccattaagtttgtgcgcaggagctgcggtggtaatattaccgcgtgagtaagaagaagtagtaatggtggctatagctcagttggtagagccctggattgtgattccagttgtcgtgggttcgagtcccattagccaccccacttcctgatgaagtgaagatttagcagtattttgtgacagtgcgaaggtggcggaattggtagacgcgctagcttcaggtgttagtgttcttacggacgtgagggttcaagtccctctcttcgcaccacgcaaaatatctgataaatataagatttatatggacaacggtctgataaatcgggtagtatgagcaacacaaatcggcgagtagcgcagcttggtagcgcaactggtttgggaccagtgggtcggaggttcgaatcctctctcgccgaccacattcgaaaaacctgcttttttaaagcaggttttttttcgcctgcagtttatgaggatgagtacctccgcaggaggagcctcgcgaagcgagacaacgttgctttagcaacggcccgcagggcgcgtatccagaatgcgcgtaatctttctctctctgaccattttcaaagaaaccgacgtaagtcggtttttttacgtccgccgtttatgagggtaagtccttcccgctgcaacgaaacgcatagcgaccaacccgtgcagcattgcacgggtttttgcgtatttgaacattggcattttgtctcaaccggcacgtatgtaggttttcagcgacaatgtggttcgaagttgtcgccagtttgagacaaataatccattgattttaaaaattaaaagtggctttggcttaagtcgtcgttttgcggcgacagcatcagatcggccgtgggtaaagaacgacaggggacggcatgctgagataaagtgaggggtaaataaaaattcaatattttcaataaattaaatactattttttatggcgaatttcctggatctaaaagttggcacgtcaaatgcaatacctatagcgtagatgctcattccacctcttatgttcgccttaggcttcataaaccctgggaatgacgcagagccgatttagggtgcctatcgcccacgagaacgatgactaacccgtcatcacgctcagggcaaaacgttgagtgaggcaccgcccctgttgtcctagacctgattgcttctttatacacttgccatacggcaagtgtttttttttgcgccacagaaaaccctgggcaaaaaaagcgcggcatcggagccgcgcttttctcacttgggcagggcgttattcgccgccgttctgtttcagcgtcaacatcagtccctcacgtcgcatctgcgccgcttcatccgaacgatgcagtttttccagcgtatcggccaaccaggcgtagtcgtaagcatccgggcgctgtttcaacgcttcgcggaaggcgtcggccgcttgctgccattcgccgtgcttcatcagcagttgccccagcgtgctgttcagcagcggcgtcgcgccgtgttgcttcatctgctgacgcagcgctttctcaagctgctcggggttgccggacttcagccgcggcagcaacagcaccaggcgctcgtcatattggcgcttcaggctatcgagcacaatctcctgcgccagttcgtggtcgttgcattcgatcaggtgctccaccatcgcgatttgcagcggcacttcgtgacgcgtcttgcggctctgatctttccaccagcgcttcaggccttcgctgccttcgtccgccatcgcctgattcatcagcccgatgtaagcctgttgctgcaacgcctgcagctgctcttcactgtgcagctcgattttacgcatcgacggcagcacttccagcagcgacgcgtaggcgccggtgcgcagataggcttgttccgccaggcgcaacacttccggatggcgcggcgcctggttcagcaggcgatcgacgccgtggcgcgcggcatggttctcgccctgcgccagctggatgcgaacccgggtgatatccaccggcagctgatcggtatcggcggcttcagcggcgcgctccagatattggttggtacggaagtcatcgccgcgttgctgtgcggcctcggcggccagcaggtagttcaccaccggttgctcagcgtgatcggcgttgcgcgtcatcagcttttcaacctgtttgtagtcgccttccgccagtttgatcagcgcggctttggtttgctggcgcgcgcgggtgcgcttgcggccgataaaccagccgcgcgtgcgggcgccggtacggaagatgcggcgcaggatccactcgatcgccagcagcaccacgaacagcagcaccagcatgatcaccaggccggtgacactggtttcaatattgtagttatcggtctggatcagcacatagccctgatgcccggccaacatcggcccgagcaccacgctggcgatcaccaccaggaacagaaatagcacgcgtaacatggcttaaccctcctggtgagcggcaggggactgggtcatcaggttgcgcacccgggtctgcatcactttttccagcagcggctggctcttcagctgatccggcacatccatcgagatcgactgttggctcaggttgtccagttcttccaggaaggccttggtcgccgggtcggtggtgtcgaaataggcgcgcacccaggtggagacggtttccagcgactgcttgtaggtctcgttctgatggcgcgggatggcctgtgcggccaccagcaggcgcgaacggatgttctcgcgcaggtagatgtcctggttcggcgccagcagcggttcggcgctggtgtcgcggcggcggatggtgatgaagtcggccatgaaattgcgccagctcttggccaggttctgccgccattcgccgatcgagccggagagctcgctgctgttttgatccatcggcgcttcgtcggtgtcgttgtccgccaggcgcaggttatccacctgattggacagctgattgaccttgaggataatgccgtcgtaatcgacctgggtcagcgtggaaagcgtgctgatgtcttcggtaatggcgcggcgcacgtcgagcaggctcggatcgttcatgtccgccaggctggcgtcggcgcttttcagcagcgcggcggcgctggtcacgtcctgatcgctccacagcttgcggccggccattttcaccaggaaatcggcctgcgccagcagccaggttttggcgtcgctgccggagatggtcgccactttttcctgcagctcgctcagttggcgcgccagattcgcctgctcgcgatcggcggcgtccagggttttaccctgctgttgcagcaggccttccagcgcgtttctttcctgctgctggctctgcttcacgccttcgagctgctgctgcagtgcctgattggcggcgatcagctgttgcgcctgcttgtgcgtgtggtaatagccgcccgcgccgagggcgatgaccagcacgatagcgatcgcgccgagcaccgggccggtgttcttgcctttgcggctggcagcggctggctgctgggagctctcaaccgcggtggttggctcttcaaccggggcggatggggtattttgttccgtcatagtggcacatcccatagtcagattattgtagcgcgcggatcagcgcgtcattatcggcgttgtcagctacccgaatcgtacgccagcccaagtcccgggcgagggtagccaggcgttcgctcactactaccaggcggcaacgcagcagccatgaagaacgatagtaatcaggaactaaagtatagagctgttgtaacatttcaccgctggtcaccaccagcgtatccacaccggcgcgctgccagtgggcgctttgctcgctgccgtcatagtgcaccgggctgcgttgataacattcataatagctgacgtcggcgccgcgctcgctcagcgtcgaccccaacagttcgcggccgccgttgccgcgtaaaatcagcgcgcgtttgcccgccagcttttgcagcgccggcagcagcagcagcgtttcgctgatctcgcgttcgcgcgggtactccaccggcaaactgctgatgcggtgcagcgccagcccggtggtgcgaccgatggcgtaataagtcaggtgcgcgggccagctcagcccggcgcggccgataaccgaatcggcataactcaccgaatgctgcgacagcacgaacaccagatcgccggcgctaagctgctgcaacgcctgcggcagcttcggcagatcgccgccgggggcgaagtcgatcagcggtgcatgataggcaacccggccgagcgcgcgcagccggctcaccagcagctctcccgaaggcgatgggcgggttaccagaatggtcatgccggcggatttccctgataaacttcgcgcaggatctcgcgcgcgccgcgcgccagcagctcttccgccagctcaacgcccatccgttcggcctcggcggccgggccgcggcgttcgccgcgcaccatctggctgccgtccggcgcgccgaccagcgcgcgcagccacaggctgtcgccatccagttcggcatagctgccgatcggtacctggcagccgccttccaggcgggtgttcatcgcccgttcggcgcgcacgcgggtttcggtggccgcatggttcagcggcgccagcagcgcgcgggtgacgctgtcgtcgagacggcattcaatgccgaccgcaccctggccgaccgccggcagacactcttcggcgctcagcgggctgcggatgcgttgctccagacctaaacgcttcaggccggccaccgccaggataatcgcgtcgtagtcgccgttgtccagcttggccaggcgagtgccgacgttgccgcgcaggtcgcgcacgatcagatccgggcggcgttcacgcagctggcactggcggcgtaggctggaggtgccgaccacgctgccctgcggcagctgatcgagcgaggcgaaacgattggaaacaaaagcgtcgcgcggatcttcgcgttcgcaaatggtggtcaaaccgagcccggcagggaaatcgaccggcacgtctttcatcgaatgcacggcgatgtcggcgcggccttccagcagcgccagctcgagttctttaacaaacaggcctttaccgccgactttcgccaacggcgtatccagaataacgtcgccgcgggtgaccatcggcaccaactcgacctgcaggccgggatggcaggccatcagacgttgctgcacataatgtgcttgccaaagagcaagcgggctttgtcgggtggcaattcgaataattttgtctaacatgcttgttaccgtttttatatttcgccatccatcctaccactgagagccaatactgtcagtgcaagaagccggaggcggaaaaaggacaacggaatcaaagggacgtgtgatgtgctttggggcagttaacactgcgggtaaatcgtttagggaagcgctacaataattgtgaagcgttacctcctttacggtcaatcagcaaggtgttaaattgatcacgtttccagcaataagtcgccaaatattcttcttacactaacggcgcttatggaatacgggtttttttctaaacaccgggataatcaggcgagacgtcttgtacctctacatcgagacattgaagcagagactggatgcgatcaatcagctacgcgtcgatcgcgccctggcggctatgaagcccgcgtttcaacgggtatacagtctgctgcccaccttactgcaccaccaccacccgctgatgccgggttacctgaacggtaacgttccccacggcatttgcctctacacgcctgatgaaactcaacaagattacctgaacgatttagaagacaaatggggcagcccgtttgacaaaccggccagcggcgagctgccgatcaccggcgtctattcgatgggcagcacctcgtctatcggccaaagctgcagctcggatctcgatatctgggtctgccaccagtcctggctggacaacgaagaacgcacccgcctgcagcaaaaatgcagcctgcttgagaagtgggccgcctcgatgggggtggaagtcagcttcttcctgatcgacgaaaaccgtttccgccataatgaaagcggcagcctgggcggcgaagactgcggctcgacgcagcacatcctgttgctggacgagttctaccgcaccgcggtgcgcctggccggcaaacgcatcctgtggaacatggtgccgggcgaagaagaagcgcactacgatgaatacgtgctgtcgctgtacgcgcagggcgcgctgacgccgaacgagtggctggatctcggcggcctgagttcgctgtcggcggaagagtacttcggcgccagcctgtggcagctgtacaagagcatcgattcgccttacaaggcggtgctgaagaccctgctgctggaagcctattcctgggaataccccaatacccagctgctggcgacggacatcaaacatcgcctgcatcagggcgagatcgtcagcttcgggctcgacgcctactgcatgatgctcgagcgcgtgacccgctatctgaccgacatcaacgacaccacccgcctcgatctggcccgccgctgtttctacctgaaagtgtgtgaaaagctgtcgctggccaaggcctgcgtcggctggcggcgcgagatcctcagccaactggtcagcgagtggggctggagcgacgagcgtctggcgatgctggacaaccgcgccaactggaagatcgagcgggtgcgcgaagcgcataacgagttgctcgatgcgatgatgcagagctaccgcaacctgatccgtttcgcccgccgcaataacctcagcgtcagcgccagcccgcaggatatcggcgtgctgacccgcaaactgtatgcggcgttcgaagcgctgcccggcaaggtgacgctggtgaacccgcagatttcgccggacctgtcggaaaacgatttaacctttattcatgtgccggttggccgcgccaaccgcaccggctggtacctgtacaatcaggcgccggccatggattcgatagtcagccatcagccgctggaatataaccgctacctgaacaagctggtggcctgggcctatttcaacggcctgctgacgccgcagacccgcctgcacatcaagagcggcaacctgtgcgataccgccaagctgcaggagctggtggccgacgtttcccatcacttcccgctgcgcctgccggcgccgacgccgaaagcgctgtacagcccgtgcgagattcgccatctggcgatcatcgtcaatctggaaaacgatccgaccgccgcgttccgcaatcaggtggtgcacttcgatttccgcaaactggacgtgttcagcttcggccagcagcagcagtgtctggtgggcagcatcgatctgctgtaccgcaactcctggaacgaggtgcgcactctgcatttcagcggcgagcagtcggtgctggaagcgctgaaaaccattctcggcaaaatgcatcaggacgccgcaccgccggagtcggtggaagtgttctgctacagccagcacctgcgcggcctgatccgcacccgcattcagcagttggtatcggaatgcatcgagctgcgcctgtccagcacccggctggaacccggccgcttcaaggcggtgcgcgtcgccgggcagacctgggggctgttcttcgagcgcctgagcgtgtcggtgcaaaaactggagaatgcggtggagttttacggtgccatctccaacaacaagctgcacggcctgtctatcaaggtggaaaccgatcaggtgcatctgccgccggtggtggatggcttcgccagcgaagggatcatccagttcttcttcgaagacacctcggatgacaagggtttcaacatctatattctggacgagtcgaatcgggtggaggtgtatcaccactgcgagggcagtaaagaagagctggtgcgcgacgtcagccgcttctactcttcatcgcacgatcgtttcacctacggctccagcttcatcaactttaacctgccgcagttctatcaaatcgtgcagctcgacgggcgcacgcaggtgatcccgttccgcagcaacgtgctgtccagcctgtgcgtgacggtggccgacggcgccgctcagccgctgaagcagcagttccagctgcattgacgccgcaagggctcggtggccgagccccgcattgcctcaggaaaaacgcagttcctcaccggcctgcgcgctggccgcttcgctgagcagttggtaaaacggctgcccgctgcgatcgcataaccagacgccgtcgcggtagttgaagtggtaaccgccggccttggtggcgagccacacctggtgcagcggctcctggcggttgatgacaattttggtgccgttttcgaagctcagcgtcatcacgccgccattggtttcgtaatcgatgtccgcatcgccgtcaaaatcgtccagtgtctcttcaatattcagcatcagctggtcggccaactggtgaaactcgctgtcgttcatattcaattcctattgcttttcatgatccacctgcgattatagagaccttggacgcatgaattacaggcattaatgcaaatgaaaaaacaactacgctatgcgctgatggcagttctggttaccggcctcgccggctgtggtctgaaaggcccgctttacttcccgcctgccgaccccgccagccaaaaaccggccaagccgccggtgcaaacgggcgatcaggtgcaaaagaaccagcaggagcagtctggctctcagcaaaaaccgtcgatggttgaccagtaacaccctgtttgcggtggcgagcgccgccgtaaaatcaagacggatagcgcgtccagatagcggagtatgatatgcagttctccaaaatgcacggtctgggcaacgactttatggtggtcgatgccgttacacagaatgtctatttttcacctgagctgatccgccggctggccgatcggcacctgggcgtcggctttgaccagatgctggtggtagaaccgccttacgatcccgaactggattttcactaccgaatttttaacgccgacggcagcgaagtggcgcagtgcggcaacggcgcgcgttgcttcgcgcgcttcgtgcggctgaaagggctgaccaacaaacgcgacatccgcgtcagcacccaaaccgggcgcatggtgctcagcgtcaccgacgacgatctggtgtgcgtcaacatgggtgagccgaatttcgacccgcaggcggtgccgttccgcgccgccaaggctgaaaagacctacatcatgcgcgcggcggaacataccgtgttgtgcggcgtggtgtcgatgggcaacccgcattgtgttttgcaggtggacgacgtaaacaccgccaaggtggagctgctcgggccggtgctggaagggcatgaacgcttcccggaacgggccaacatcggctttatgcaggtggtcagccgcgatcatatcaagctgcgcgtttatgagcgcggcgccggtgaaacgcaggcctgcggcagcggcgcctgtgcggcggtggcggtggggatccaacaggaattgctgtcagaagaagtgcatgtagagctgccgggcggcagcctgcatattcgctggaaagggccgggcaacccgctgtttatgaccggtccggcaacccatgtctatgacggatttattcatctatgaaaagcgtagaagaacagagcgtcgccggcctggcgctggatgacgacaccgtgatgcagtatctgctgcagaacccggatttctttattcgcaacgcgcgccaggttgagcagatgcgcgtgcctcacccggtgcgtggcaccgtttcgctggtggaatggcatctggcccgccagcgcaatcatatcgaacggctggaagaagagatcacgctgctgatggagcaggccagcgccaacgaagggctgttcgccaggctgctgcacctgcaggccgatctggccaccgccgacagcttgcaggacatgctcaaccggctgcagcgctgggcgcgcggcttcggtttggccggcgccacggtgcgtctgttcgccgagcgctggaatatcggcgcgccttccgatttcacccatctggcgctgacgcgttcggcgttcgagccgttccgcatccagcggctgggcagcgaacaacactacctcggcggcctgaacggccccgaactgctgctgctgttgccgcaggccaaacagatcggccagattggttcggtagcgctgtcgatgctgggcgacgatggcgagctgggcatggtgatcttcagcagccgcgatacgcaacattatcagcagggcatgggcacggtaatgctcaatcaactggcgcgcatgctgccggaactgctggaacgctggatcgaacgcgcatgacgccgattgcgcccagcctgcagcagccggtggacgcttttctgcgttatctcaaggtagaacggcaactcagcccgctgacgcagctcagctattcacgccagctgacggcgctgatgtgcctggcgcaggagatcggcgtcaccgactgggcggcgctggatgccgcccgggtgcgcatgctggcggcgcgcagcaaacgcgccggcctgcagtccgccagcctggcgctgcggctctcttcgttgcgcagtttcctcgactggctggtcagccagggcgtgctgcacgccaacccggccaaaggcatccgcacgccgcgcagcggtcgccatctgccgaaaaatatcgacgtcgatgaaatgaaccaactgctggagatcgatctcaacgatccgctggcggtgcgcgatcgcgccatgctggaggtgatgtacggcgccggcctgcgtctttccgagctggtggggctggattgccgccatgtcgatatggcggccggcgaggtgtgggtgatggggaaaggcagcaaagagcgtaaactgccgatcggacgcaccgccgtcacctggctggaacactggctggcgatgcgcgatctgtttgggccgcaggatgatgcgatgtttctgtccaatcaggggcgacgcatctcgacgcgcaacgtgcaaaagcgcttcgccgaatggggcgtgaaacagggcgtcaacagccacattcacccgcacaaactgcgtcactcctttgctacccacatgctggagtccagcggcgacctgcgcgcggtgcaggagctgctcggccacgccaacctgaccaccacgcaaatttatacccacctcgactttcaacatctggcgaatgtgtacgatgccgcgcatccgcgcgccaaacgggggaaatcctgatgcatttttatcgcccgctgcgcccgctggcggcgctgactttcgatctggacgacacgctgtatgacaaccgtccggtgatccggcaaaccgagcagcagtcggtggccttcctgcagagctaccatcccggcctgaacagcttccagtcggcggatttccaccgtctgcgccaggagctgcgtgagcaggatccggagatctaccacgacgtcacccagtggcgctggcgcgccattcatctggcgctgagccggcaggggctgcgcgacgccgaagccgcgatcggagccgatgcggcgatgcaaaacttcgcgctgtggcgcagccgcatcgaggtgccggaagcgacccacgccacgctgaaggcgctggccgcgcgctacccgctggtggcgatcaccaacggtaacgccgatccggcgcagtgcggcctggacggttacttccagttcgtgttgcgatccgggccggacgggcgcgccaagccgtatcaagacatgtatcacctggccgtcgaacggctgggcgtggcgcccgggcagatcctgcacgtgggcgacgatctgactaccgacgtcgccggcgcgctgcgcgcggggctgcaggcctgttggatcaacgatcggcaacgctgcctgatgcaggccgccgacagccgcctgctgccgcatattgagatttcgcagttggcatcgctgacagcattgttataatccctgccagaactctgtataaatttccagtgaaaaacccgtcaccggcgggttttcccttaaccattagtggtgcctatggacgtctccgatctgctcgacagcctgaatgaaaaacaacgtgaagccgtggcggcgccgcgcagcaacctgttggttctggccggagcgggcagcggcaagacgcgggtgctggtgcatcgcatcgcctggctgctgtcggtggagaactgctcgccgtattcgattatggcggtgaccttcaccaacaaggcggcggcggaaatgcgtcaccgaatcgaacatctgatcggcaccagccagggcggcatgtggatcggcaccttccacggcctggcgcatcgtctgttgcgcgcccatcacctggaggccaacctgccgcaggatttccagatcctcgacagcgacgaccagctgcggctgctcaagcgcatcatcaaggcgctgaacgtcgacgagaagcagtggccgccgcgtcaggcgatgtggtacatcaacggcaagaaagacgagggcctgcgcccgcagcacgtcgaaacctacaacaacccggtggaggccacctggctgcgtatctaccaggcctatcaggaagcctgcgatcgcgcggggctggtggatttcgccgagctgctgctgcgtgcgcacgagctgtggctgaacaagccgcatatcctcaaccactaccgcgagcgtttcaccaacgtgctggtggatgaattccaggataccaacagcatccagtacgcctggatccgcctgctggcgggcggcaacagcagcgtgatgatcgtcggcgacgatgaccagtcaatctacggttggcgcggcgcgcaggtggaaaacatccagcgcttcctgaaggatttccccggcgcggaaaccatccgtctggagcagaactaccgttccaccagcaacatcctgaaagcggccaacaccctgatcgccaacaacgacgggcgcatgggcaaaaacctgtggaccgaaggcggtgaaggcgagccgatttccctctactgcgccttcaacgaactcgacgaagcgcgcttcgtggtcaaccgcatcaagacctggcaagacaacggcggcgcgctgaacgactgcgccatcctgtaccgcagcaacgcccagtcgcgggtgctggaagaggcgctgttgcagacggcgatgccgtaccgcatctacggcggccagcgcttcttcgaacgccaggaaatcaaggatgcgctggcttacctgcgcctcatttccaaccgcaacgacgacgcagccttcgagcgcgtggtcaataccccgacgcgcggcatcggcgatcgcaccctcgacgtggtgcgccaggcggcgcgcgatcgccagctgacgctgtggcaggcgacgcgcgagctgatgcaggacaaggtgttggccggccgcgccgcgtcggcgctgcagcgtttcatcgaactggtggaatcgctggcgcatgaaaccgccgacatgccgctgcatgtgcagaccgaccgggtgatccgcgactccgggctgttcatcatgtatgaacaggagaagggcgagaaggggcaggcgcgtatcgaaaacctcgaggaactggtgacggcgacgcgccagttcagctatcaggacgaagatcaggatctgatgccgctgcaggcgttcctgtcgcatgcggcgctggaagcgggcgaaggccaggccgacgcctatcaggacgcggtgcagctgatgactctgcactcggccaaggggctggagttcccgctggtgtttatcgtcggcatggaagagggcatgtttccgagccagatgtcgctggatgaaggcggccgtctggaggaggagcgccgtctggcctatgtgggcgtaacgcgtgccatgcagaagctgacgctgacctatgccgaaacgcgccgtctgtacggcaaagaggtttaccatcggccgtcgcgctttatcggcgaactgccggaggagtgcgtggaagaagtgcgcctgcgcgccagcgtatcgcgcccggtcaatcaccgccgcatgggcacgccgatcagcgagaacgataccggctataagctgggccagcgcgtgcgccatcccaagtttggcgaaggcaccatcgtcaatctggagggcagcggcgagcacagccggctgcagatcgccttcccgggtgaaggcatcaaatggctggtggcggcctacgcgcgtttggaaacggtctaacgagagaggcgttgcaggggcaagcccctgcaatcgttcaccatcagtgagggtagcggtcgccgacctgtgcggtggcgtaccagcgcatcactgcttcggtaccttcgccgccttcctgcggcgcccacggcatgcagtcttcttcggtcagcgcctgatacggtccctgcttcacttcgaacaccacgccgccggcatcgaccgacagcaccgcatgccaggtaaaggccggcatctccagcactttggtttcttcgccgagcagggtgcgctgcgtcacgacgccgtcatcgttgaactgtaatacgacgaaacggccgcgcagcggcgtcagcagctcccaggtttgcgggtggcggtgcgggcggatataggtgccgggttccatggcgatcgccaggcgttgcaccgggtcgctcagctcttcgtgtaaggtgcggtgcgcgcgcaggcgggccacgctggcggcctgttcgctcatcgcggtcagttcatgggcggtaatctgtttcatcggttaaatccgcatgcttgtcgtaccattagggtgatgtcatcttagcaacattctgggaggtggtaagcgatcgccgcgactttttcagtacggtttaagcgccatttctgccattgatcatcgtgatgatttgttgcgcaattatcccgcctaacgtgttgacaggctttttcttctcggcgtaacatgcgcgcactattatcattgaggacagacgccttggacacacccagtagatactggctcactgacctgcgccgcaggtataacttctaaggctctccgtttttgctgatagccttcgtggttgtcggcgaccccgcaaagcgtcgctatgagtcagatctcttcatggtctgaaacaaatcggtgatacgcatcccctctgtttctgtgcttcaacgcgttgtccgcacccgttaccttcacggagttttggcacatgctgagcgcttttaaattagataaccgccgcttgtcccgtctggaactggacgactcggatgatctcacgtcatcgctgtgggttgatctggtcgagccggaagagggcgagcgtgagcgcgtgcagaatgagctgggacaaagcctggcgacgcgtcccgaactggacgacatcgaagcctccgcccgtttcttcgaagacgaagacggtctgcatatccactccttcttctactttgaagatgcggaagatcacgccggcaactccacggtggccttcaccatccgcgacggtcgcctgtataccctgcgtgagcgtgaactgccggcgtttcgcctgtaccgcatgcgcgcccgcaaccagaccatgctcgaaggcaacgcctacgaactgctgctggatttgttcgaaaccaagattgaacagctggcggatgagatagagaacatctacagcgatctggaacagcttagccgggtgatcatggaagggcatcagggcgacgaatacgacgccgcgctgtcgacgctggcggagctggaagatatcggctggaaggtgcgtttgtgtctgatggatacccagcgcgcgctcaacttcctggtgcgcaaggcgcgtttgccgaccggccagctggagcaggcgcgtgaagtgctgcgcgatatcgaatccctgctgccgcacaacgaatcgctgttccagaaggtgaacttcctgatgcaggcggcgatgggtttcatcaacatcgaacagaaccgtatcatcaagatcttctcggtggtgtcggtggtgttcctgccgcctacgctggtggcctccagctacggcatgaactttgaattcatgccggaactgaaatggtcgttcggctacccgggcgccatcaccttgatgatcctggcgggcctggccccttacctgtacttcaagcgcaagaactggctgtaactcggcggcgccgggctcagcgcagcttgcgctgggtatagagcgcgtcgagggtgaacaggatcagcgccgcccagataaagccgaaggtcaccagcttgtcctggccgacggtctcgccgtagaaggtgaccgccagcaggaacatcagcgtcgggccgagatactggaagaaaccgagcgtcgacaggcgcagccgggtagccgccgcggtgaagcacagcagcggcacggtggtgacgataccggcggcgaccagcagcagattcagcgaccacgggttggcgctcaggtggctggtggggctgtcggcgaacaggaacaggtagcccgccgccaccggcagcagccacagcgtttcaatcagcatgccggtctgcgcgtcgatggcgattttcttgcgcagcaggccgtagaaggcgaagctgaacgccaggcccagaccgatgatcggcaatgagccgaactgccagagctgcaccagcaccccggtgaacgccagcgccaccgccacccactgcatgcggcggaaacgttcgccgagaaacagcatccccaacagcacgttaaccagcgggttgatgaagtagcccaggctggcttccagcatatggtgattgttcaccgcccagatgaacagcagccagttgccgccgatcaacagcgcggtgaccgccagcaacagcagccgtttgcggttttggcaggcggcgcgcactttcggccagttgcggcccagcgtgatcagcgccagcatgaagaaaaacgaccagatgatccggtgggtgaggatctcgtccgcggatacttgctggatcagtttgaaataggccggggcgatgccccacataaaataggcggccagggcgaagaaaatgccctgacgcgtttgctttgcgtccatgacgtcactctggtggggaacgtaagatgcggtgagtgtactgaagtcgctcaccgcacacaatcatcagccgaccagataggtggcggtagcggtcgcgatatgcaggccgtcgtggttatgcagttctacgcgcgcgacggcgaccttgttgccgctgcgcagcacgctggcggaggcgacgaagtgttcgccgcggccggggcgcagatagtcgacgcgcagatcgatggtgcccatgcgcgacagtttggcggcgatctcctcttcgatcagcggttccatgcgcgtcagcacgccgccggcgcaggccagcccggcggcgacgtcgagcaccgcggcgatcacgccgccatgcagaatttcctgcgcggcgttgcccaccagcttgcgctggttggtgaagctcagctcgacgtagtcatcgtcgaagcggcgcagctccaggccaagctcgcggttgaacggcatgtggtagacaaagatttcgccgatcttgcggcgggcggcttccagggtcagagcagtggttgacatagcggggttccgtttttcttttgcgttttaagggagctaactggtcagtccaggttaatggaatgttgattttatgcttaacctttgttgctttccagactattccaataaaaccggaccgcgctgcggtaaatcctcctttgtgtgtaaaatggcctgattttttccgggcttgccctttttcgttggagtaaggagaggttatgcgcattttgtcagggatcgtttccgccacgctgttgatgccggcgctggcattggctgaggaagccaaagagcagcagattcacgataagccgacggtgcgcggcagcattatcgccaacctgctgcaggagcacgataatccattcacgctgtatccttacgatcccaattacctgctgtacaccgacaccagcgatatcaacaaagaagccatcaagacgtacaactgggccgacaaggcgcgcaaggacgaggtgaaataccagcttagcctggcgtttccgctgtggcggggcattgccggcgacaactcggtgctcggcgcgtcttatactcagcgctcctggtggcaattgtccaaccgcggcgagtcttcgccgttccgcgagaccaactacgagccgcagctgttcgtggggtgggcgaccgattaccgctttgccggctggacgctgcgcgatgttgaaatcggcgttaaccatcagtctaacggccgctcagatccgacgtcgcgcagctggaatcgcggctatgcgcggctgatggcgcaaaatggcaactggcaggtggatctcaagccctggttccgcttctcggagagctcgagcaacgacgacaacccggacatcaccaaatacatgggatactaccggttgaaggtcggttacgcctggggcgacagtgtgttcagcgtcgacagccactacaactggaacagcggctacggcggcgcggaactgggctggagttacccgatcacccgcaacgtgcgtttctatacccaggtgttcagcggctacggcgaatcgctgatcgactacaacttccggcagacacgggtgggcgttggtgtcatgctgaacgatattatgtaatcatacccgatgggtgtgtaccgatgaaaaaatggggaagtgtgtgtcaaccgcagcagtgattaacagagagttgctggccgagcaggtattgcgcgatacctttggctaccagcaattccgcccgggccaacaaacgattatcaacgccgcgatcggcgggcaggattgcctggtggtgatgccgaccggcggcggcaagtcgctgtgttaccaaatcccggcgctggtgatggacggcctgacgctggtcgtttccccgttgatctcgctgatgaaggaccaggtcgaccaactgttggcctacggcgtttccgccgcctgctacaactcgacgcaaacccgcgaggagcagctggacgttatggccggctgccgcaacggtaccatcaagatgctgtacatcgcgccggagcggctgatgatggaaagcttcctcagcctgctcgatcactgtccgccggcgatgctggcggtggatgaggcgcactgtatttcgcagtggggccatgacttccggccggaatatcgcgcgctgggtcagctgaaacagcgcttcccgtcgatgccggtgatcgcgctgaccgccaccgccgacgaggccacccgcggcgatatcgtgcgcctgctgtcgctgcaggacccgctggtgcaggtcagcagcttcgaccggccgaacatccgctacacgctggtggaaaaattcaaaccgctcgatcagctgtggcgcttcgtgcaggatcagcgcggcaagagcggcattatctattgcaacagccgcgccaaggtggaagacaccgccgcgcgcctgcaaagccgcgggctgagcgtcggcgcttatcacgccgggctggacaacgatcgccgcgcccaggtgcaggaagcgttccagcgtgacgatctgcaggtggtggtggccaccgtcgccttcggcatgggcatcaacaaacccaacgtgcgtttcgtggtgcatttcgacatcccgcgcaatatcgaatcctattatcaggagaccggccgcgccgggcgcgacggcctgccggccgaagccatcctgctgtacgatccggccgatatggcctggctgcgccgctgcctggaagagaaacccgccgggcaacagctggacatcgagcgccacaagctgaatgccatgggggcgttcgccgaggcgcaaacctgccgccgcctggtgctgctcaactactttggcgaaggcaagcacgaaaactgcggcaactgcgatatctgcctcgatccgcccaagcgctacgacgggctggaggacgcgcgcaaggcgctgtcttgcgtgtaccgcgtcggccagcgcttcggcctcgggtacatcgtggaagtgctgcgcggctccaacaaccagcgtatccgcgaatatggccacgacaagctgccggtgtacggcatcggccgcgatcagaccaccgaacactggaccagcgtgctgcgtcagctgatccacctgggttttatcacccagaacatcgccatgcactcggcgctgcaattgaccgaggcggcgcgcccggtgttgcgcggcgaggtggcactgcagctggcggtgccgcgcattcagagcctgaagtcgcgcagcagcgccaaccagaaatcctacggcggcaattacgatcgcaagctgttcgccaagctgcgcaaactgcgcaagtcgatcgccgacgaagaaaacattcctccctacgtggtgttcaacgacgccacgctgctggaaatggccgaacagatgccgatcaaggccggcgatctgctgagcgtcaacggcgtcggccagcgcaaactggagcgtttcggcgcgccctttatggcgatgatccgcgaccatctcgacaatgacgaagactgagggcgataaatcatgctaatgctgtttctcaccgtggcgctggtgcatctgattgcgctgatgagcccggggccggacttcttttttgtgtcgcaaaccgccgccagccgttcgcgccgcgaggcgatgatgggcgtggtcggcatttcgctcggcatcgtggtgtgggccggcgtggcgttgatggggctgcacctgatcctgcagaagatggcctggctgcatcagatcatcatggtcggcggcgggatgtacctgtgctggatggggtggcaactgctgcgttccgcgcgggcgcagcaagcgcagccggcagcggaggcccaggtggcgttgcccaaggccgggcgcagctttattcgcggcttcctgaccaatctgtccaacccgaaagcggtgatctatttcggcagcgtgttctcgctgttcgtcggcgacagcgttggcgccggagcgcgctgggggctgttcttgctgatcgtcgccgagacctttgtctggttcagcctggtggcggtggtgttcgcgctgccggcgatgcgccgcggctatcagcggttggccaagtggatagacggggtggcgggcgtgctgtttaccggcttcgggttacacctgatctttacccgctgaccggcagtgaaatgcccaaggccgagcagcgatgcccggccttttttgtcaggctttgcgggcagtcgccagcagccccgccaccagaatgaacagcgaaccgaacagtcggttgagcaactgcatctggcgcggtgttctcagccagccggcgatgcgcgtcgccaaagtggcgtaaccgatcatcaccagaatatccaccaccacggtggtgacgccgagcaccagatactgctcggcctgcggctgattgggcaagatgaactgcgggaacagcgcggcgagaaacacgatgcttttcgggttggtcaggttgaccagcaccgcgcggcggaacagacggcggcgcggcatgctgcccgccagcgcatgcagatccagcgcgccggcggcgcgccactgctggatgccgagccacaccaggtaggcggcgcccaaccatttcaacagttcgaacgccagcagcgattgcgatatcagcgcgccgagaccgatgcccaccagcacgatgtgcgcgctcagcccgacctgcagcccggctatcgaggcggcggcgccgcgatagccgtggctgatgccggtgctcatggtattgatggcgcctgagccgggggaaaggctcaggataagcgtggtcagcagataggttaaccaccagtccaaggtcatggtgcttcggctccctgaaagtgtcgttttgtgccacaatgcgccgaggcggcgccgtttttgtcagaattgaatcacaatacgctagtatgatttcttgtgccagcggtcacattttccgccggccccacagggaaaacgctctcgatgacctcgttcactctcagctccgatgactggttaacgcgtgaaacgcagttcgctgccttcgccaccgggccgctgctggatttctggcggcagcgcgaagaaggcgaattcagcggcgtggacggcgtgccgatccgctttgtgcgcttcagttctgcgcggcatcagcgagtggtggtggtcagccccggccgcatcgaaagctacgtgaaataccccgaggtggcctacgatctgttccactgcggctacgacgtggtgatcgtcgatcatcgcggccaggggcgctccgggcgtttactggcggatacgcaccgcggtcatgtggtaaacttcgccgactacgtggatgatttcgaacagctgtggctgcgcgaggtcgaatcgcacggttatcggcagcgcttcgcgctggcgcattcgatgggcggcgcgatcctggcgcagttcctgcagcgccggccgcaggcgttcgacgcggcggcgttttgcgcgccgatgttcggcatccggttgccgatgccgggttggctggccgatcgcattctcgactgggcggagacccgcccggcgatccgcgactattacgcggtgggcaccggccagtggcgtccgttgccctatgtggtcaacgtgttgacccatagccgcgagcgttaccggcgcagcctgcgttattatgccgattaccccgagctgcaggtgggcgggccgacctaccattgggtgcgggagagcatccgcgccggccggcagattatcgcgcaggccgggaagatcaccacgccgctgttgcttttgcaggccggtgaagaacgggtagtcgacaaccgttcgcaccaggctttttgtcaggctctgtcagacgcggggcgcccttgcgaaggggggctcccgtgggttatcaacggcgcacgccatgagatcctgttcgagcgggacgcgctgcgcgccgaagcactgaacgcaattctgcgcttctttgctcaacacttaggcggcgcgctgccgccgacaactccatcagaggttagaacataacgctatgtatcacgtcgtcgcttccgatttagatggcacgctgctgtctcccgaccataccctgtcgccgtacgctaaagaaacgctgaagttgctgactcagcgcggcgtgcatttcgtgttcgccaccggccgccaccatatcgacgtggcgcagatccgcgacagcctggagatcagcgcctttatgatcacttccaacggcgcacgggtgcacaacaccgccggcgaactgattttcagccacaacctggacggggatatcgcccgcgatctgtacggcatgctgcacgacgatccggatatcaccaccaacgtctaccgtaacgacgattggtttaccaaccgcgaaagcccggagcaggaagagttcttccaggagtcggtgttcaaatatcagctgtttgagccgggcctgctggaaaccgacggcgtctgcaaggtttacttcacctgtgaagatcacgagcggttgctgcaggtggaagacgccatcaacgcgcgctggggcgatcgggtcaacgtcagcttctcgttccctacctgcctggaagtgatggcgggcggcgtgtcgaaagggcatgcgctggaagaagtggccaagatcatcggctatacgctgcaagagtgcatcgccttcggcgacggcatgaacgatctggagatgttgtcgatggccggcaagggctgcatcatgcgcgacgcgcatcagcgcctgaaggacatgctgccggagctggaagtgatcggctccaacgtcgataacgcggtgccgcactacctgcgcaagatgttcctttgaaataaccattaaataacaagggcgcctcgcggcgcccttggcattacttgtgctggccctgcttctgcaggaactgcacgcccttgtccgggaagtcggtgaacacgccgtcgacgccggcctggttgtaaatcacgtcatacagctggttcacgtcggtcacgtacttcggcagcgcatcggcgcggatggtgaacggatgcaccgccagcttgctggcgtgcgcttctttcaccatgtcggtcagcacgatgtggcccggcttggattgatccgccaccaccagcatgtggtagtccggcccgatgccgtcggcatactgagcgattttcttcatcgcgcccggtttgaacatccagtcgtagtcgtattccacccacttgccgtcggctttctgctcataggtttcctgccagtcgttataggcgatcagctgcaccagcttcagatccatgcccagcttcggctccagctcgttcttgatgcgcttgagctcgttggcgtcgaagcactgcaggtagacgttgtcgttcttgccggtgtagccgtactgcttgagcaccgccagcactttgctggagatgtctttgccttcctgtttgtggaaccacggcgccttgatttcagggtagatgccgatgttcttgccggtcgaatggttcagaccctgcacgaactcgatctcttcctggaaggtgtgcacgcggaagtcggatttgcccatcgggaagcggccagggtagccctgcaccttcttgccgttttcgatttcaaagccttcggtgaacttcagcgatttgatctccgccagcgtaaagtcgatggcgtaataacggccgtctttacgcgcgcggtccgggaagcgttcggcgacgtcggtgacgcgatcgaggtaatggtcgtgcagcaccaccagctcgttgtccttggtcatcaccagatcttgttcgagataatcggcgccctgcgcgtaggccatcgccttcgccggcagggtgtgttccggcaggtagccgctggcgccgcggtgggcgatgaccactttgtccgccgcctgcgcggcgctgaccatcgaggtggcgagaatgatccctgtcagcagggctttgacttgagtccgcattccgttttctccgtgttgttgggggcagggtagtaaaaaggccgcagggcggcctttaaatcatgcaaaagtcgtgtgacgcttaaccgcgcttggcggcgatttccgcgtggtgtttcttctcgttcagcatggtcagcagcagcaggatgaccgctgcgatgctgccgccgatcatcaccatgaagccgccgtcccaaccgaagaagtccacggtgtaaccgacgatggcgctggccgcgaccgagccgcccaggtagccgaacaggccggtgaagcccgcggcggtgccggcggctttcttcggcgccagctccagcgcgtgcaggccgatcagcatcaccgggccgtagatcaggaagccgatgaccagcatacagatcatgtccacggtcgggttgccggccgggttcatccagaacaccacggtggcgatggtcaccagcgtcatgaagaacacgccggtggcgccgcggttacctttgaacactttgtccgacatccagccgcacagcagagtgcccgggataccggcgtattcatacaggaagtaggcccaggaagacttgtccagcgcgaagtgcttcacttctttcaggtaggtcggcgaccagtccagaatgccgtaacgcagcaggtagacgaacacgttggcgaccgcgatgtaccacagcagcttgttcggcaggatgtactgcatgaagatctgcttggcggtcagctcttcttcgtctttttcgctgtagtcgtccggatagtcgtttttgtactcttcaatcggcggcaggccgcaggattgcggggtgtcgcgcatcagggcgaaggcgatcagggccaccaggatggcgccgaaggccggcatgtacagcgccgcgtgccagtcgttgaaccaggccatacccagcaggaacagcagcggcggcaggccgccacccacgttgtgggcgcagttccagatggaaacgatgccgccgcgttctttctgcgaccaccagtgcaccatggtacggccgcacggcggccaacccatgccctggaaccagccgcacaggaacagcagaacgaacatcaccgcgatgctggaggtggcccacggcacgaagcccatgaacaacatcaccgccgccgccaggatcaggccggcaggcaggaacactcgcgggttggaacggtcggagaccgaacccatgatgaatttggagaagccgtaggcgatggagatgcccgacagcgcgaagccgaggtcgccgcggctgaagccttgttcgatcaggtaaggcatggccagggtgaagttcttacgcaccagatagtaagcggcgtaaccgaagaagatccccaggaaaatttgccagcgcagcttacggtagagcgggtctaccttatcgctcggcacacgggcgatgtgtgcggccggcttaaaaatactcaacatgagcgcctccgatggctttatctgttatcacatcaatatgaccttttacgttcatttgatgattgagcggatatcgaatgtggtgtttttgtgttccataacgagcgccattgtcgacaaatacgcctggtgtcgctgtgacgaatggcgcaattgttacactttcatgaaaccacggcggattttgagcgattcgttaacgttatgaaatagaaaaacgtccaaaaatcgtgattatgatcacattgatggttttttgtggacatttttatttcgttttatgttcgttcttgttccttatcaaacaaagaccctaataaccgtggctcaataggctcataactaccgatcctgagggagcgacatgagcagctattttgacggcggcgaaacggatgtgatcatcatcggcggcggcgccaccggcgcaggcattgcccgcgattgtgcgcggcgcggcttgcgctgcattttgctggagcgtcacgacatcgccaccggcgccaccggccgcaaccacggcttgctgcacagcggcgcgcgctatgcggtgaccgacggcgagtcggcgcgcgagtgcatcgaagagaaccgcatcctgaaacgcatcgcgcatcactgtatcgagcgcaccgatgggctgttcatcaccctgccgcaggactcgctggagtatcagcaacagtttatcgccgcctgtcgccaggccgacatcgacgccgaagcgatcgacccgcagctggcgctgcggctggagccggcggctaatccggcgctgattggcgcggtgcgggtgccggacggcaccgtcgatcctttccggctgaccgccgccaacatgctggatgcgcgcgaacacggcgcgcagatcctgacttaccaccaggtggtcggattgttgcgcagcggcgaccgggtgacgggcgtgcgcgtttacgaccatcagaatcagcggcgctatgagctgcacgcagcggtggtggtcaacgccgccggcatctggggccagcagatcgccgaatacgccgatttgcgtatccgcatgttcccggccaagggagcgctgctgatcctcggtcaccgcatcaacaacatggtgatcaaccgctgccgcaaaccggcggacgccgacatcctggtgccgggcgacaccatctcgctgatcggcaccacctcgacccatatcgactacgaccaaattgacaacatgctggtgaccccgcaggaggtggacattctgatccgcgagggggcgctgctggcgcccaccctggcgcagacccgcattctgcgcgcctatgccggggtgcggccgctggtggccagcgacgacgatcccagcgggcgcaatgtcagccgcggcatcgtgctgctcgatcacgccgcccgcgacgggctggaagggtttatcaccatcaccggcggcaagctgatgacctaccgcctgatggcggagtgggccaccgacaaggtgtgcgaaaagctcggggtaaaccgcccgtgcaccaccgcgcaggacgcgctgcccggatcccgtcagtcggcggaggaaacggtgcgcagcgtggtttctctgcccgccagcatccgcggctcggcgatttaccggcacggcgatcgcgccagccaggtgccggcggccgatcggctcgacaccagcctggtgtgcgagtgcgaggcggtgaccgccggggaagtgcgctatgcggtcaattcgctgaccgtcaataacctggtggatctgcgccgccgcacccgcgtcggcatgggcacctgccagggtgaactctgcgcctgccgcgccgccggactgctgacgcgcttcaaggtcagcacgccgcagcaatccatcgcgcagctgtcgcagttcctcaacgaacgctggaaaggcgtgcggccgatcgcctggggcgatgcgctgcgcgagagtgaatttaccagttgggtttaccagggattatgcgggcttgaggcccaggcagacaaagagcaggaggcggatgatgcgatttgacgtagtggtgattggcggcggcctggcgggcctgagctgcgccattgccgtggccgaacagggcaaacgctgtgcggtggtcagttccggccagagcgcgctctacttctcctccggctcgctcgatctgctggcgagattgccggacggcacgccggtcgagatgccactggcggcgctgccgcagctggcgcaacaggcgccgcagcatccgtattctctgattggccccggccgggtggcggcgctgtccgccgccgcgcagcggctgctggaacgctgcgggctgaatctccagggcgagggggtgaacaaccatctgcgcatcacgccgctcggcacgcgccgcgccacctggctcagcccgcaggcgatcccgacgctgccgctgaccggccaactgccctggcggcgcattgcggtgatcggcatcgaagggttcctcgacttccaaccgcagatggccgccgacgccttaagccgcgagctcggcgtgcagacggacgtggcctatctgcacatgccggcgctggacagattgcgcaataaccccagcgagttccgcgcggtgaacatcgcccgggtgctggatttgatggaaagcctgccgccgttggctgaagagctgcggcggctggcgggcgaggccgaggcgctcttcctgccggcctgtctgggcctggaggacgacgcgtcgctggcggtgttgcaggatgcggtcggcaagccggtccgactgctgccgacgttgccgccttcggtgcccggcatgcgcttgcaccaggcgttgcggcggcgtttccaacagctgggcggcgttttcatgccgggcgacagcgtgctgcgcgccgagtgtgaagccggccgcgtcaccggcctgtatacccgcaaccacggcgatattccgctgcgggcgcagcaggtggtgctggccagcggcagcttcttcagcaacgggctggtggcggatttcgatgaagtgcgtgagccgatcttcgggctggacgtacacagccgggcggatcgcgccgactggagccgacgcgagctgttcgcgccgcagccttacctgcagttcggcgtgcgtaccgacggcaggctgcgggcgatgaagcagggagtgccgttcgacaatctgtatgccatcggtgcggtcgccggcggttacgatccgctgcagcagggctgcggcgccggcgtgtcattgatcggtgcgctgcacgttgcgcagcagatcgccgcggaggagaacgcatgagcctgcatcaggatcacagctttgaaagctgcatcaaatgtaccgtctgcaccacctactgcccggtcgccaaagtgaacccgctctacccggggccgaaacaggcggggccggacggcgagcggctgcggctgaaagacccgacgctgtacgacgaggcgctgaaatattgcaccaactgcaagcgttgtgaagtagcctgcccgtccgacgtcaaaatcggcgacatcattcagcgcgcccgcgccgactttgcccagagcaagccgacgctgcgtgacgccatcctcagccacaccgatatcatgggatcgctgtcgacgccgttcgcgccgatcgtcaacgccgccaccgggctgaaaccggtgcgcaagctgctggacaaggcgctgaagatcgatcaccgtcgtgaactgccgaaatactcgttcggcaccttccgccgctggtaccggcaacaggcgcaggcgcagcagcgttacgccgagcaggtggcgttcttccacggctgcttcgtcaactataaccacccgcagctgggcaaggatttggtccgggtgttcaacgcgctggatatcggcgtgcagctgctgaaacgcgagaaatgctgcggcgtgccgctgatcgccaacgggtttatcgagcaggccaaaaagcaggccagggtcaatgccgaatcgctgcatgaaacggtgctggagcgcggcattccggtggtggccacttcgtcgagctgcaccttcaccctgcgtgacgaataccctcatctgctggacgtggacaccactgcggtgcgcgagcgggtggagctggcgacgcgctatctctatcgtctgatcaatcaggggcgcagcctgccgctcaagcgcacgccgctgcgggtggcttatcacacgccttgccatatggagaagatgggctggaccgcctacaccctggagctgctgcggcagataccggggctggagctggtggtgctggattcgcagtgctgcggcatcgccggcacctacgggttcaaatcggagaactacgccacgtcgcagggtatcggcgcaccgctgttccggcagatagaagagagcggggtggatctggtggtgaccgactgcgagacctgcaaatggcagatagaaatgtccaccagcaaacgctgcgaacatccgatcaccctgctggcgcaggcgctggcataaagcgaaagggccggcaagccggccctttgtgggattactgcttcagcttcagggtggagatgatgccttcggcttcggtctgcgcctgctgctgattgtccgccggcagcgttacctgaatggtcagcatgttgttgttcagcgagccgatcaggacggaagaataggctttctcgccgccgctggtgatgatgctgtccagctgacgcagcggtacaccgttgacgtcgagcgctttgttggtgatcacctgcaggttggcgtcacgcgcgcgttgggtattctccaggcgcttggccagggtctccaggctgtcggcggtcttgtcacccaggatcacaatcaccgcgcgctggccggtgctgtctgcgtaaacatgcatgttgttggcctggttgcccagcttgccgctctgatccgccatgccgacaggcagggtgaacgccagtttaccgtccagcaggctcacctgctgcccggccggcgcgctggccgccgcgccgtccgttgccgccttggtgtctttggtttcgccgtcgcaggccgcgaggccaagcgccagcaggctgatacccatcaatttcgctactttacgcatcgggcttccttcttcctttccggtagggattcactgtcgtatcgcaacctattccaggttgaaatgcaaggcagatgttgtcacaagtttttttccagtaatagccgataatcagccacttcgcctttcttttccagctgaacaatctgatagtggtgggcgatcagcagcgtcagcatggcgcggaaccggttacgggttttgaccgtcagttggcgatagccctgcgcccgcgcccagcgctcttgttcggccaacaaggcctgcgccacgccgtggcgacgaaatgccggcaacacgccgcccagccagctgtaaaacaccgtttcctgccgttgataaccgagtttgaaaccggccggttgcccggctatctcggcgatcaacaggctggcgggggcggcgccgatgcgccgctgcagatcggccaggctatgcaggccgccgaattcggggatgcgttggtaaaggcggtggatgtcttcaagcgtggcggtgcggacgatcggggtcatgagcggcctccaaaggatagggccgcccagaataacacgactcagcccggctgcaggccgccgctgcgcgccgcgatgcgtttgagcagcatgttcagcaatacgccgtacatcggcaggaagaacagcaggcagatcatcaccttgaagctgtaatccaccagcgcgatctccacccagttgttggccatgaagggatcgctgctcttataaaaggcgatgaagaagaacgccagcgtatcgctgatgttgccgaggaacatcgccgccgccggcgccacccaccacgcgctgcgttgacgcaggcggttgaagacgtgtacgtcgaggatctggccgagcacataggccataaagctggcgacggcgatgcgcgccacgaacaggttaaaactgttcagcgccgcaaagccctgccattctccctgataggtgacggtggagatcacataagagatgaacagcgccggcaccatcaccgccaggatgatgcgccgcgccagcggcgcgccgaagatgcgcacagtcagatcggtcgccaggaagataaacgggaaagtaaaggcgccccaggtggtatggaagccgaaaacggtgatcggcagctgcaccaggtagttgctggaggtaatgatggcgatatgaaacagcgaaagccagaccaacgcggtaaagcgctgctgtgcggtaaacgaatacatgttgtagcctttttagcagtggggtgagggaacccagtgtgtcttgtcaaaacagcaaaaaacgctgcgcggcggcatgatacgcgtttgcgcaaccaatgcaatggttaaatttaacgcaaacgttaacgcatcttgcgcagaaaaactaccggcgtaaactaggcgctaatgagatgcggcgagcgttcgccgatcgtttttgaacgagaaaaattgcatgactgacttatttgcccaggcagaccagacgctcgacgcgctggggctgcgctgtccggaaccggtgatgatggtgcgtaaaaccgtgcgccatatggacaacggcgaaacgctgctgattatcgccgacgatccggccaccacccgcgatatcccggggttctgccgctttatggagcacacgctggtggcgcaggagaccgaacaggtgccataccgttatctgttacgtaaaggcgtctaacggcggcgcggccgagttaaaagtttcctcccccaaatgacaacgggcgcggtatgccgcgcccgtgtttgtttcagagcttagctgcgctttctcaatagccgcagcgcgttggcggtgaccagcgcggtggcgccggagtcagccagtaccgccagccacaaaccggtcagccccagcaggctggtgatcaggaagacccccttcaaccccagcgcgatggtgatgttttgccggatattggcgtgggtggcgcgcgagatgcggatcatctccgcgacgcccaccagccgattgtgggtcagggcggcgtcggcggtttccagcgccacgtcggtgccgctgcccatggcgatgccgatgttggaggctttcatcgccggggcgtcgttgatgccgtcgccgatcatcgccgtcgggcgcagttcactcagttcggtgaccgctttgaccttatcttccggcagcagaccggcgcgatagtcgaggcccagctcgccggcgatcgcggcggcggcgcgcgggttgtcgccggtcagcatcacgccgcgaatgcccagcgcgttcagttcggctatcgcctgcttggcgtcgccgcgcagcgtatcgcgcagcgccagcaagccgatgggcgcgccgtcttccagcaccaccaccgccgttttgccggcgttttccagcttgtctacctggctctgccattgggcgtcgagcagacccggcgccagcttgcccggcgcgctgatcagcacggtcttgccgtccacgatcccttccacgccgacgccggccagcgcacggcgcgcctgcgccagcggcaactcagccccgcttgcggcggcgcggttgatgatcgcctgcgccagcgggtgatgtgaaccggcttccaccgcggcggcaagctgcagcagccgctgttcggtgagcgcgccgatcggcagcacgtcggtcaccgtcggcttgccttcggtcagggtgccggttttatcgaaggcgatggtttggatctggcccagttgctccagcgccgcgccgcctttaatcagcgcgccgcgccgcgtggcggccgccagtccggatgtgatggccgccggcgttgagatcaccagcgcacatgggcagccgatcagcagcagcgtcaggccgcgatagatccaggtatcccacggctgcgagaacagcaacggtggcaccaggatcaccgcgacggccagcagcataatggccggggtgtaatagcggctgaagcgatcgaggaagcgttcgatcggcgcgcggcgctcctcggcctcttcaatcagctgcaggatgcggtcgatggcgtttttgccgggctcggatatcaccttcatctgcgccgcctgatcgacggacaggctgccggcggccactttctccccctgttggcgctcgaccggcaccgattcgccggtcagggcgctttcatcgaagctggcgaacggattgagcagctcggcgtcggccggcaggcgcccaccgggcgcgatttcaatcacgtcgccggggcgcaggttggcgaccggcacgcgtttgcgttccgtgccttgcagcagcagcgcatcttccggcaccagctccatcagcgccttcaccccgcgccgtgcgcggttggcggcgtaggattccagcagttcgccgaccataaacagcagcagcaccatcgccgcttcggcggtggcgccaatgaacagcgcgccgatggccgccacgctcatcagcgtttcgatggcaaacggcgtgccggagcgaatcagacgcagcgccttggcggcgaccggcgccaacccgaccagcgtggtggcgataaaggcgatgcggcccagctccgggttaacccgatccagcacccaactgaccaccatcagggtggttaacagcagcagcggcgcgaattcgccgaagcgtgaggttttcggcgcggcggctttggcggtctgagcgccgagcagggtaaagccggcctgggtgaccgcatcctggatccgcaggctgatgtcggactgcgcgtcgaccaccagtttctcggtggcgaacaacacgcgcgcgctgtcgacgccggggagtgcggtgacggcattttcgattttcttggcgcagctggggcagtccatgccggtgactttccagctgaaacgttggctgccggaagggggagcggcggccagcctgtcgctttcctcgtccggatcgtcgggcgcggcggtgcagcagccgctatcgccatgatcgtgatgatggtgggcgtgttcggcctgtgcggtggcgtttttcggttcgctgctgcagccgtgctgagttttgctgtggctgtggttgcagccgcatccgccttcggcgtggtgatgttcctgatgattatggttttgctgattgtgcataacgtccccctgcgggctgttaaacgggtttgctcaactgactctacaccctggagtccactccagagtcaagcgccggatgagaattattgctaacggcgttcaagcgtagaaaggggggtattcattcaataatgaataatgcggattttaatctatcggcttttcttatcccctattggggcgaaaaggcacgctgccgttagtttaaataagaaaataatattcctatagaaactaaaaaatcgcccgacctaataataaagagttattaatctataacgctttagcaaaatttaccttttcccctgagtaaagccagcatgattcgcttgagtctgcaggccgcattgctattgaagtttggtgccaacttatcctcatcaagtttcatttgttttgtaaataagcctaaaaagcagcataacaaactttcgttgcgataataaatggttgattattttatgtgcagttttgcgaccctgcctataattggaatcgattaccatttttaatggtgatcttatttgctgatatatatgcattaattctacctaacacactgccggtaacggcgcataagccccttccagcaagcttaaggtttattaaccgtggcttacggggaggttatgtctatctgtctgattgatatcaatcaggtaatgagtggaatcgaaccaatgcaatctactaaaaaggcaattgaaattactgaatccagccttgcggccgcgacaaccggctacgatgctgtagatgacctgctgcattatcatgagcggggtaacgggattcagattaatggcaaggattcattttctaacgagcaagctgggctgtttattacccgcgagaaccaaacctggaacggttacaaggtatttggccagccggtcaaattaaccttctccttcccggactataagttctcttccaccaacgtcgccggcgataccgggctgagcaagttcagcgcggaacagcagcagcaggctaagctgtcgctgcagtcctgggctgacgtcgccaatatcaccttcaccgaagtggctgccggtcaaaaggccaatatcaccttcggcaattacagccaggatcgtcccggccactatgattatggtacccaggcctacgccttcctgccgaacaccatttggcagggccaggatttgggcggccagacctggtacaacgtcaaccaatccaacgtgaagcatccggcgaccgaagactacggccgccagacgttcacccatgagattggccatgcgctgggcctgagccacccgggcgactacaacgccggtgagggcaacccgacctataacgacgtcacctatgcggaagatacccgccagttcagcctgatgagctactggagtgaaaccaacaccggtggcgacaacggcggtcactatgccgcggctccgctgctggatgacattgccgccattcagcatctgtatggcgccaacctgtcgacccgcaccggcgacaccgtgtacggctttaactccaataccggtcgtgacttcctcagcaccaccagcaattcgcagaaagtgatctttgcggcctgggatgcgggtggcaacgataccttcgacttctccggttataccgctaaccagcgcatcaacctgaatgagaaatcgttctccgacgtgggcggcctgaagggcaacgtctcgatcgccgccggtgtgaccattgagaacgccatcggcggttccggcaacgacgtgatcgtcggcaacgcggccaacaacgtgctgaaaggtggcgcgggtaacgacgtgctgttaggcggcggcggggcggatgaactgtggggcggtgccggcaaagacatctttgtgttctctgccgccagcgattccgcaccgggtgcttccgactggatccgcgacttccagaaagggatcgacaagatcgacctgtcgttcttcaataaagaagcgaatagcagtgatttcatccacttcgtcgatcacttcagcggcacggccggtgaggcgctgctgagctacaacgcgtccagcaacgtgaccgatttgtcggtgaacatcggcgggcatcaggcgccggacttcctggtgaaaatcgtcggccaggtagacgtcgccacggactttatcgtgtaacacagcaacggaacgcccggcgcagtctcggccgggcgtgatgcaggagcccggtatgaaaggtactttaacgcgcgccgctttggcggcgggtggcatgatggtgacgagtgcggtgatggccggcagtttggcattgccgaccgcgcagtcgctggcggggcaatggcaggtggccgacagcgaacggcaatgccaaatcgagtttctggcgcatgaacaaagcgagaccaacggctatcagctggtggatcggcaacagtgtttgcagagcgtgtttgcggcggaagtcgtgggctggcgcccggctccggacggcatcgccctgctgcgggcggatggcagcacgctggcgttcttctcgcgcgacggcgatctgtaccgcaatcagctgggtgcggatgatgctctgacgttgaaagcgctggcttgatgaagaaacgggttcggcgcgccgaacccgcggtaggtctctacaggtagagcgaacgcacgatcaggaagtggccggagaagtaacagaaagccacgatggcgtccgccgcgcggaaggtgaagcggtagcggttgagcagccaaaccacgttggccagcagcagcagcgaggtgccggtcagcagcgagaagccgaaatcggtgctgcgcaggaaatattgttcgcccgccagccagaccatcagcagcgtcatcgctacgtaggtaacgatcggccagcgcatctcttccagccgggtccagacggtggccagcagcagtgcgccgatcgccagcagcgccagcggcagcggccagaacaggctgaacgtcatctggctggcgaaactcagggtgtacagcaggtgggacaggaaaaaggcgccgatggcatacagcacccgttcgcgcggcaacaggagcaatgcgtcgccgatcagcgtcgccagcaggccgagtacgatcagataacccgcagcgctgagcaccggcgcctgccaggccaacagcaacagcagcagcagcgtgacgggtttgaacacccagcgctgccagcgcggcccacggtaagaggcgtcgacgaacagccaaccggaaaagaatacggcaaggaacggccaactcattatgtcttccttatgtaggagggagccgcaacaaccggctccaaactgtcaccaatgtcacttcttcatttcagtgtaggtagcctgccggcgatcgacaatgctttcttgagaatgctatgtttacgctgatttagccgcgaaggaaatgggaaaccgatgagtaagccaccgttattttttgtcgccgtgattgcgctgatcgccgtgctggccacgcaacgctacttcaagcagcggcagcaggaggcggaaaacgatcgcgcgccgatgcgcagtctgcaggtgacggtgagcgacaaacgcgcggtgccggtcaccaagacccgcgcgccgcagcgcgagccgttggtcaatgaaccgatgaattacgaggtggtgttcagcccggtacagggaggtgaagacatccagctgcggctgaagcaatggcagtacaacccgatagaaaagggcgcgcagggcacgttgaacatgcagggcacgcgcttcgtctcgttcaccgctcagccgtagcggtcacttcttcttgatgggcggctgtttcttttgccaggccagcagctcgaacacgccaaagataaagatcttggcctcttgccagtagctgatcggctgatccttcggctgggtggatttcaacagcaccagctgcaggccgtgcatcaccaccataaagaacagcgccacgtcgatgaaatacttcagcggcttgggaaacggatggaacaggttagagagcaggaagccccacacgcacagcatcagcaggcggcccagattaatcaacatggtcggttttctcttgcgaacgaatataaaggcgataggccacctggccggcgaccttctcccggtgcagctgccagctggcaggcacgtccgccgcggcgctttccgcctcggcttctacatagatccaggcctcgtcggccagccagccgcgttgctccagcaacagggcggtctccgccagcaggcctttgcgaaacggcggatcgaggaacaccacgtcgaacggttggccatcgcccgccagccagctcagcgcgttggtgttgataaccacccctttgccctgcagcagcgccagatttttttccagctgctgcgccaccggccgttcgaattcgagcagcgtggcgctgccggcatagcgcgacagcgcttccagccccaatgcgccgctgccggcgaaacagtcgaggcagcgcgcgccctgaatcaccggcgccagccagttgaacagggtttcgcgtacccgatcggtggtggggcgcagccccgggctgttcggcaccgggagtttgcgaccgcgccattggccgccgatgatgcggatctgtccggctgcggcctggggcggttttttggccgccgcccgtggcgagagtcttgtcataagcgttgtttggtttctttcgcggcgcggggccgccgaggttaacgaaaagttgtccctattctaccggtgacgggcgtcggggggaacggtaaaacgttgttgtctgatttcacgccggaaagcatgccggatgcgtgttgctgggcgagggaaagtgatagactcggcggattattgtcagcatatatccttcaggtatggagggtaagcgagccttcggtacggagtagagtcataacatggcaaaagataagaaacgtgggtttttctcctggctggggtttggccagaaggagaaggaagaagatcaacagcaacctgagccgtcggtagagcaggcggaacctcaggccgcggagacgccggctgaaccggtcaccgccaagctggacgacaagctccccgcccaggaatctgaacctgccgcctccgtcgacaccccgggagagtgggataacggtcaggccggcgagcaaatcgcggaaaatctgccggcagcggccgagcatccggcggcgcaagcgctggccgaagagatcgtcagcgtcaccgaacaggtggcggcgcagcagcaacctgttaccgaacccgagccggtcgtcgaacccgagccagtcatcgaacctgagccggtcgtcgaacccgagccggtcgttgagcctgagccggtcgttgagcctgagccggtcgtcgaacccgagccggtcatcgaacccgagctggtcgttgagccagagccggaagcggaagaagagccgctggaacccgtcgtgccggccgctgcgcaagagcaggagcgcccgaccaaagagggcttcttcgcgcgcctgaagcgcagcctgctgaagaccaagcagaacctcggctccggctttatggggctgttccgtggtaaaaagatcgacgacgacctgttcgatgagctggaagaacagctgctgatcgccgacgttggcgtggacaccacgcgcaagatcatcacctccctgacccagcacgccagccgcaagcagctgaaagacgccgaagcgctgtacggcaagctgaaggaggaaatgtccgaaattctggccaaggtcgatcagccgctggatgtcagcgggaaaaccccgtatgtcatcctgatggtcggcgtgaacggcgtgggtaaaaccaccaccatcggcaagctggcgcgtcaattccaggcggaaggcaagtcggtgatgctggcggcgggggacaccttccgcgccgcggcggtggaacagctgcaggtgtggggcgaacgcaaccgcattccggtggtggcgcagcataccggcgcggattccgcttcggtgatcttcgatgcggtgcaggccgccaaggcgcgcggcatcgatgtgttgatcgccgataccgccggccgtctgcagaacaaatcgcacctgatggaagagctgaagaagatcgtccgcgtcatgaaaaaactggacgaccaggccccccatgaggttatgctgacgctcgatgccagcaccggccagaatgccgtcagtcaggcgaaattatttaatgaggccgtgggcttaaccggcatcacgctgactaaactggacggtaccgccaagggcggggtgatcttcgccatcgccgatcagttcggtatcccgatccgctatatcggcgtcggggaaggcatcgaagatttgcggccgtttaaggctgacgattttattgaggcactttttgcccgagaggattaatacggatgattcgctttgaacaggtcagtaaagcttatctgggcggacggcaagcgctgcagggggttgatttccatctgcgcccggcggagatggcgtttctgaccggccattccggcgcggggaaaagtaccctgctgaaactgatttgcggtatcgaacggcccagcgccggccacatctggtttggcggccacgacatcagccgtttgaaaaaccgcgaggtgccgttcctgcgccggcagatcggcatgatcttccaggatcaccacctgctgctggatcgcacggtgtatgacaacgtggcgatgccgctgatcatcgccggcgccagcaccgaagatatccgccgccgcgtttccgccgcgctggacaaggtcggtctgctggataaagcgaagaacttcccgattcagctgtccggcggtgagcagcagcgtgtgggcatcgcccgtgcggtggtgaacaagccggcggtgctgctggcggatgaaccgaccggtaacctggacgatgcgctgtcggaaggcattttgcgcctgtttgaagaattcaaccgcgtcggcgtgaccgttctgatggcgacgcacgacaccgggcttatcgcccgccgcaattaccgcatcctgacgctgagccagggccgcatgcaaggaggcgctcaccatggccaataacgcaaaaaccgccaagagcaaggcgctgcgcggcggctggcgcgaacagtggcgttacgcctggatgaacgccatcaaagacatgctgcgtcagccgttggcgacgctgctgacggtgatggtgatcgccatttccctgacgctgccgagcgtgtgctacatcgtgtggaaaaacgtcagcaccgcggccagccagtggtatccgacgccgcagctgaccgtctatctggataaatcgctcgatgacgacgcggcgctgaaagtgctcgacgccatcaaggcggaagccggcgtggagaaggtgaactacctgtcgcgtgaagaagcgcgcggcgagttccgcaactggtcgggctttggcggcgcgctggacatgctggaagagaacccgctgccggcggtggcgatcgtcacgccgaagctgagcttccagagttcggacaccctcaacaccctgcgcgatcgcgtggcggcggtacagggcgtcgaagaagtgcgtatggatgacagctggtttgcccgcctggcggcgctgaccgggctggcgggccagattgcggcgatcatcggcgtgctgatgatcgtggcggtgttcctggtgatcggcaacagcgtgcgtctgagcatcttcagccgccgcgacaccatcaacgtgatgaaactgatcggcgccaccgacggttttatcctgcggccgttcctcaacggcggggcgatgctgggctttgccggcgcgctgctgtcgctggtgttgtccggggcgctggtatggcaactggagtcggtggtcgccggcgtggccaaggtattcggcaccaccttcaccctacacgggctgggttgggatgaggcgctgctgctgctgatcatctccgcgatgatcggttggatcgccgcctggctggcgacggtgcaacatttacgccgatttacaccacagtaagatttttttggtatactcttctcctgctgcttttgatcgcgttgcgggagaagagtgacctcaagcgaagtcagcaccatccctctcttcttagcgcacaaattccctatcggcctgcaccttcgtcacgtattgtcagcaacaatgcttgcaaaaaagggtgaacttctggggcggaatacggtcaaaaattgcagcaaatgttaaggtgcccggcgtgtggaaccgcttttgcttcagcaactgccgtagaatcaatcatttccccgctgtaataatcacctgcatgattttgtattctcatagagagggtttgaatgaccaaagaaatgcaaactttagccttagtaccccaaggtagcttggaagcctatatccgggcagccaacgcctatccgatgctgacggcagaggaagagcgggagctggctgaacggctgcattatcagggcgatctggatgccgctaagcagctcatcctgtctcacctgcgctttgtcgctcatattgcccgcaactattcaggctatggtctgccgcaggcggatctgattcaggaaggcaatatcggcctgatgaaagccgttcgccgcttcaaccctgaagtcggcgtgcgtctggtttcctttgcggtgcattggattaaggcggaaatccacgagtacgtattgcgcaactggcgcatcgtgaaagtggcgaccaccaaagcgcagcgcaagctgttctttaacctgcgcaaaaccaaacagcgtttgggctggttcaaccaggacgaagtggaactggtggcccgtgagctgggcgtaaccagcaaagacgtgcgcgagatggaatcgcgcatggcggcgcaggacatgacgttcgatccgactccggacgacgaggcccgcgacggccagtcgatggcgccggtgctgtacctgcaggacaagagctcggacttcgccgaaggcatcgaggaagataactgggaaagcaacgccgcagacaaactggcctatgcgctggaaggtctggacgagcgcagccagcatatcattcgcgcccgttggctggacgacgacaacaagtcgacgctgcaggagctggccgatcagtacggcgtttccgccgaacgcgtgcgccagctggaaaagaacgccatgaagaaactgaaaatggcgatcgaagcctgagtcgatgcgagattcgataaaaaaagcccggcaagccgggctttttagtgcctgaaatccggcgctatggcgccacggcggcaaagtctggcgccgggcagtcgtagccgaatttcgccgcccacgggtagcgggtgccagtgttgatgtagcgctgataaagcgcccggccggttttggcatcacgcttgataacccagctggcagcgttacacaacacggcggcataggcctggctcttcggcggcagcagatcggccgcctgttgcgccagccccaccgcctgccagcgatagtgcaggaaacggttgtcttcctccggtagcgccgccttggcgcgcgccgcttctgcgctgtcgatccagcttttatgcttcagctcgcgagtatcgaacgcatcccccagataggaatagccggcgccatagatggcgtaatccggcgtcatctcatacccggtaaactccagcccctgggcgcgcagcaggttggcggcgcgatagtaagcctgcgcgcgcgccagcggtgcggcggatttgtccttggcggccttcagctcgtcggcgtactgctgcgccgcctgccggtagttggggatatcgaagtaggccagcgcctccggcgctcgtccggcgcgcatcagccgccgcgccagcagttcgcgcagctgcacttccggcgtgatctgctggccgccgtagtcgtccggattaaccggcttgagcggcgtcgtcggcgccggggcgtgcttatcgacaaaacctttcaactcatcgacggtcagcacccgctccgccacgtcggccacgtcggcccagtagagcgctttgccgcgatacagcaggtccatcgcctgcagatagtcgccgcggttcagcgccaggatggcctgttcgccggccacccggcattcgggcacgatggtttccgcaacaaagtcggcgttgcgttgctcgccccagctttcgtcggcggggaacgcgcttgccgccttggcgtaggcggcggtggcggctttcacgtcgccgtcgcgcagcgccattttcgcgcgcagccaccacgccaggccgctgtcgccggcgtttttcagcaggctcgccgccatcgggtactgccccgaacggtaagccaacgccgccagccgatcgctgccggcgaagccgcttttcactgagccgtccagcagcgtcaggatctggctgatgatctgggcggagcggccgttgccgtcggtatccgccatttgcaggttgccgctgcgcgcgaacagctcaatggtcaccaactgctggatcaacggatcgccgataatctgtttcagcgtgtccaaatggtcggggttgaccaggaggctggagacgtactgcagcgactgcccgccgctcggatcgccctgcgccgcctgctgtgcgtacaggtgggcggcgggggcgacctcacccagccacaggtggatgcgcgcctgctgcccaaggctgctcagcgccagctgatcgggatcggtggcgccgtttttcacccgatcgatcacctgctggaatgccgtcagcgcctgttcaagttcggctttaggcggatgctcggcggcgggaaccgcttcaccggattcattcaccggtgtaccgtggtcagccatcaggacgcggccaagcgaatactgcgcccgcagtccccagtcgccctgctcggcggccggtagcttcagcacctgctggaaatagtctgcggcgcgcggatcgtggctggcgaaagccacggcgcccagttgatagagacgcgcagcgttggacaacccttgcgtattgacggcgtcagcctcttccaccgttttggcggcgcgcattttgccgatcgctatcgtttccggcgattgcggcatcggtttcggcggcatcggcggcggcggggcctgccagtgcggcaactgactgtccgccggcaccagccggccggcttcgaaggcgaaattgccctccggcatatacagcagggtgccgttgcgatcgatcagcagccggttaggaaaatccgggccgcaggcatagccgcccagcggcagtgcggcgccgatcagcatggccagcggaagaaggcggcgggtgttccgtgccgcgcgcgaatcaaggtgtgacaagggtgcctcctggcgtcagttgttggcagcgcagccagcccaacggccgggattgcccggcgcgcagctggtcgctgctgatgcgaataaagcgttgccgttgcggtgcggattccagccggtagttgccgaccgcgtccgccgccaggcagtcgtcggcgcggatgagcacctcttgcggcagcggggcgtccaccggcccgttgttatgaattatcagatcatacagcccgttttgctgtggctgaggcctaaattttacctgccagtcgacattcagcggccgccgttcgatcaccgctcgcagcgtggcgagcgaccaggcgcgccgatcgtccgccagtggcaagcggaaccagataatgccgcgcagccggggcggcgtttgctgcgccagcgtttgcagaaaatcggcgatctgctgcggcgcgaccgtcagttcgcggccgttgcccgccatgcgcagcgaggattcgctctccacctgcgcgccctgcgcatcaaaacccagcagtgccatgccataagccggcagcgcgacgcgaaacggcttcggtgtgacggcggcgtactgccgcacccagcgtagcgccaaggggccgtcaaacagcccctgctgcggcgagagcaccgcgtgcacctgcaggacggagctgtcggcctgttgcagtacgccgggcaggtcgggcgagccgatccaggccggcagggcggtgatgccgagttgcaaagcggcgggcagccgttggcgcagccgctgcagaaagcgttggtagtccggcaggcgggcggtggcggcatcatgatcgatctcgacgccggtgacgggcagcccggccgcctgccagcgctgggtgagcgccagcagccgctggataatggcctcttgatccagctgcggcagctggccgtcgaggcgggccaccagccagagtgggcggccgtcctgcttcagcaggctgagatcggccgggatttcccgccagccttcacgcggatgcacctgcagcgccagcacccgcagcttggcgaacagatcgcggctgctcgccagcgcatcggcgtgctgcggcgtccaaactcgctgccagacataaacctgctgatcccagtctgaggccaggcgcagcgcctgctggcgcccgaggaacgcggccgccagccccagcgcaatcaagaccagcgccgccaaccggcgtttcatttttgccagagatcgccctgcggtgcgaagccgcaggcgcgcatgaagttctcgacttccccacgttcgcgcggtgccaggccggcggtcgacagctgccagtgagcgacctgcggcagctgacgctgcgcatcctgtaccaggtaaagaccgacgccgcggcggcgcgtcacttcgcgcaccagcaagtcctgcagctcggcgcggtcatcctgcagcgcaattttcactgcgcccagcagacgctcgttgaagcgggcggcgaacagcgccttgccgccgctcaaccagctctgccactgttccggctgctgatgcggccaaattttaccgagatcgataaggtcttgcggggacagcgcggtcaggcgctcgatggtcagtttcatgcagaatttccgcgcagctaaatgatgccgacagtgtaatagatcttgtgcagagcgttgtgtaagtttttctgtacgattactgtgcaatatgttttttgcacggggcattttccgagtaaatagttagtaaaggggttgttaaccagcacaacgcgctacgcctaaaggtaaacggcgcagatttaattcgaattttatcctgtttacaccgcttgtttctgcctgatgaagttgatttgcagcagaaaattcctgtttaatggcatgaaaaataaagtcttattagaaaataatgccaacaaagcgcctaaatcattattacttataacaaaagcggtcaataacgatcgggcgcaggcaaacacaacaggtacgttcacaacgacagatggggatttgcggatgaaattaacaacaggtaaggcactgctggcgggttgcattgcgatggccatgagccaggcggctatggcgaaagacatcaaggtggcgatcgtcggggcgatgtccggcccggtcgcgcagtatggcgacatggagtttaccggcgcgcgccaggcgattgccgacatcaacgccaagggcggcatcaagggcgacaagctggttggcgtggaatacgacgacgcctgcgatccgaaacaggcggttgcggtcgccaacaaggtgatcaacgacggcattcgctacgtgattggccacctgtgttcctcttccacccagccggcgtccgatatctatgaagacgaaggcgtgatcatgattaccccggcggccaccaacgccgatctgactactcgcggctacaagatgatcctgcgcaccaccggtctggattcggatcagggcccgaccgccgccaaatacatcctcagcgacatcaagccgaagcgcatcgccgtggtgcacgataagcagcaatacggcgaaggcctggcgcgctcggtgcgcgacagcctgaaaaaacagggtaccgaagtggcgatgttcgaaggcatcaccgccggcgacaaagacttctccaccctggtggcgcgcctgaagaaagagaatatcgacttcgtgtacttcggcggttactacccggaaatgggccagatcctgcgtcaggccaaacaggccgggttgaccacccgcttcatggggccggaaggcgtgggtaactcctcgctgtccaacatcgccggcgccgcctcggaaggcatgctggtgacgctgccgaaacgctacgatcaggtgcccgccaaccagccgatcgtcgatgcgctgaaagccaagaagctggatccgaccggcccgttcgtctggactacctatgccgcgctgcagtcgctgaccaccggcatggagcgcagcggcagccaggagccggcggacatcgtcaaggatctgaaaaccggcaagccggtggacaccgtgatggggccgctgagctgggatgacaagggcgacctgaaaggcttcgagttcggcgtgttcgagtggcatgccaacggcacgtccacaccgatcaaataagccataatgattagggtggggcgcagtttgctgcgcccggcgagtcggcttgccggccccgtctccctttacccgccggttctccgccggcgggtttcgcagccaagggttcagagtatgtcagagcagctcctctattttctgcagcagatgttcaacggcttaacgttgggcagcacctatgcattgatcgccatcggttacaccatggtttacggcatcatcggcatgatcaacttcgcccacggcgaggtgtacatgatcggcagctatgtctcctttatcgttatcgccgccctgatgatgctcggcatcgacgtcggctggctgctgatcggcgccgcgttcctggtctcgatcgtcatcgccagtgcctacggctggagcatcgagcgggtagcctacaaaccggtgcgcaactccaagcgcctgattgcgctgatctcggccatcggcatgtcgatattcctgcaaaactacgtcagcctgacgcagggctcacgcgatctggcgctgcccagcctggtgaccggccagtgggtgctgggggaaagcaacggcttcgccgccaccatcagcaccatgcagctgaccatctggctcgtgaccttcctggcgatgctggcgctgacgctgtttatccgctattcacgcatgggccgcgcctgccgcgcctgcgcggaagatctgaagatggccagcctgctgggcatcaacaccgaccgggtgatctcgctgaccttcgtcatcggtgcggtgatggcggcggtggccggggtgttgctcggccagttctacggcgtcatcaacccttacatcggctttatggccggtatgaaagcctttaccgctgcggtcctgggcggcatcggcagcattcccggcgcgatgatcggcggcctggtgctgggcgtggcggaagcgctgacctccgcttatttgagcaccgaatacaaagacgtggtgtcgttcgcgttgctgatcgtggtgctgctgatcatgccgaccggcattcttgggcgtccggaggttgagaaagtatgaaactcaatctgcttaatgcgctgatcgccacggcggtgctgttcgtgatggcgtcgttcctgatgggcatgcagctcagcctggacggcaccaaactggtggtgcacggcgcggcggaagtgcgctggatgtggatcggcatcggctgcgtcatcgtcttttttttccagctgttgcgcccgctgctgctgcagggcctgaaaaaggtctccggcccggcgttcgtgctgccgagcttcgacggcaccacgccgcggcaaaagctgctggcggctctgctcatcgtcgcggcggtcgcctggccgttcctggtgtcgcgcggcacggtggatatcgccaccctgacgctgatctacgtgatgctgggcctcggcctcaacgtggtggtgggtttgtccggtctgctggtgctgggctacggcggtttctacgccatcggcgcctacacctacgcgctgctgaatcattattacggtttcggattttgggagagcctgccgctggcgggtatcgtcaccgccgccttcggcttcctgctcggtttcccggtgctgcggctgcgcggcgactacctggcgatcgtgacgctcggcttcggcgagatcgtgcgcatcctgctgctgaacaataccgagatcaccggcgggccgaacggcatcagccagatcccgaaaccgacctttttcggcctggaatttaaccgcagcgtgcgcgacggcggttgggataccttccataacttcttcggcctgaaatacgatccgagcgatcgcatcgtgttcctgtacctggtggcgctgctgctggtggtgctgacgctgttcgtcatcaaccgcctgctgcgcatgccgctcgggcgcgcctgggaagcgctgcgtgaagacgagatcgcctgccgctcgcttggcctcagcccgacgcgcatcaagctgaccgcctttaccatcagcgccgccttcgccgggtttgccggcacgctgttcgccgcgcgccagggtttcgtcagcccggaatccttcaccttcgtcgagtcggccttcgtattggcgatcgtggtgttggggggcatgggctcgcagttcgcggtcattctggcggcgatcctgctggtggtatcgcgcgagctgatgcgcgatctgaatgaatacagcatgttgctgctgggtgcgctgatggtgctgatgatgatttggcggccgcaggggctgttgccgatgaaacggccgcagctgaagctgcaggcggcggatattcacgcgggcaagggggaacaggcatgagcgttcaacctttacttcaggtggaaggcctgtcgatgcgtttcggcgggctgctggcggtcaacaatgtggcgttgacgctcaatgaaggcgaaatcgtgtcgctgatcggccccaacggcgccggtaaaaccacggtattcaactgcctgaccggtttttaccgcccgagcggcggcaccatcaaattgcgcgatcgccatctggaagggctggcggggcaggccatcgcccgtatgggcgtggtacgcaccttccagcatgtgcggctgttccgtgaaatgacggtgattgagaacctgctggtggcgcagcatcagcacctgaaaagcggcgtgttcgccgggttgctgaaaaccccggccttccgccgcgccgaagccgaagcgctggcgcgcgcggcagagtggctggagcgcgtcggcctgctatcgatggccaaccgttcggcgggcaacctggcctacgggcagcagcgtcggctggagatcgcccgctgcatggtgacccggccggagctgctgatgctggacgaaccggccgccggcctcaacccgaaagagaccgacgagctggatcatctgatcgtcgagctgcgcgatcggcataaggtctcggtgctgcttatcgagcacgacatgaagctggtgatgggcatttccgatcgcatttacgtggtgaatcagggcacgccgctggcgcagggcacaccggcggagatccgtaacaacccggacgtgatccgggcttatttgggcgaagaataatatgttgtcattcaatcaggtatccgcccattacggcaaaattcaggcgttgcatcaggtcagtctcacgataagtcagggcgaaatcgtgacgttaatcggcgccaacggcgccggtaaaaccacgctgctcggcaccctgtgcggcgaaccgcgcgccagcgaaggcagcatcgtctttcagggccaggacatcacccagtggcaaacctcgcgcatcatgcgtgaagcggtggcgatcgtaccggaagggcggcgcgtcttctcgcgcatgacggtggaagaaaacctggcgatgggcggcttcttcgccgatcgtcaccagtatcaacagcgcatcgaacgggttttcacgctgttcccgcgcctgctggagcgccgaagccagcgcgccggcaccatgtccggcggcgaacagcaaatgctggccatcggccgcgcgctgatgagccagccgaagctgctgctgctcgacgaaccttcgcttgggctggcgcccatcattatccagcagattttcgacatcattcagcagctgcgggaagagggcatgaccatcttcctggtggagcaaaacgccaatcaggcgctgaaattggcggaccgcggttatgtgctggaaaacggccgcgtggtgttggaagatacgggggctgcattgttagccaacgaagcagtgaggtcggcgtatctgggcggttaatccgcccccctacgaattaaaataatcaggtacgagaagaagaaatgaagacagaagggttactcgcgcagcgcatcgttaacgtaaaaagttcggccatccgtgaattgcttaagcacagcaagatggaacacgtcatttcgctggcgggcggcatcccctctgatgcgctgttcgatttcgaaggattgagcattgccacccagcaggcgatcaccgaacagccgaaaagcgcgttccagtatggcctgaccgagggcagcccgctgctgcgtgagcgcatctgcgcgctgtgcgccgagcgcggcgtcaccgcgcgcgcggaagaggtgatggtcaccgccggctctcagcaggcattggatttggtgatgcgcgccatcgtcaacccgggcgacgtgttcgtggtggaacgcccgacctacctggcggcgctgcaaacgctggaactggcggaagccaacatcatgtcggtctcgtccgacagcgacggcatggtggtggaagagctggccgagctgctgaaaacccagcgtatcaagggcgtgtacgtggtgccgaacttcggcaacccgagcggcatcaccctgagcgccgcgcgccgcgaactgctggtgaagctggccgccgaacataacttcctgatcatcgaagacgatccgtacggcgagctgcgtttcaccgaagagcgccacccgacgctgcatcaggtgtcgcagcgggtgctgggcaataccgaccacatcatctatacctcgaccttctccaagatcctggcgccgggcctgcgcctgggttgggcgatcctgccgccgttcctgctgcataaagtggcgatcatcaaacaggcggcggatctgcacgccagcgccctgtcgcagagcatcgtcgaatgctacctcggcctggatcgcctgccggcccagatcgacaagatccgcgccgcctacaaacagaagggcgagatcctggccggtttggtggagcaggagctgggcgactacatcaccttcgataaaccgaagggcggcatgttcctgtgggcgcgtttccgccagccgttcaacgccaccgaatggctgaacaccacgctgcagcagggcgtagtgttcgtgccgggggaatacttcttctccgacaacccggatcgttcgaccttccgcctgtcgttcgccactgccaccgagcagcagatgcaagaagcggtggcgcgcctgcgccgttcgctataagcctcgcggcggcggagccgatgcccgccgccgacatcaaaccgccatcttcacttcaccttgccgtcatgtggctgtcatctaacggttatttttctgtcatccgcgcatggcatgttagcttccgaacaaaaaactgattcttttcgctcacgcgcttttacaccagctttttcaggagttaggcatgctcacctacgctattcgcaaaaccacgctgtgcgtcgcattgaccctggcggtcagcgcccaggcgctggcggcgacagaaatcccgttctggcattcgatggaaggcgaactgggtaaagaagtggactctctggcggatcgcttcaaccagtcgcacagcgacgtcaagattgtgccggtttataaaggcaactacgaacagagcctggcggcgggcatcgccgcttaccgctccggcaaggcgccggcgatcttgcaggtttacgaagtgggcaccgccaccatgatggccagcaaagccatcaagccggtctacgaagtgtttaaagaggccggcatcaacttcgacgaatcggtgttcgtgccgacggtggccggctattacaccgacaacaagagcgggcatctgctgtcgcagccgttcaacagctccacgccggtgctgtactacaacaaagacgccttcaaaaaggccggcctgaacccggatcaaccgccgaaaacctggcaggaactggcggcggataccgccaagctgcgcgaagccggcatgaagtgcggttacgccagcggctggcagggttggatccaactggagaacttcagcgcctggcacggcgtgccgtttgccagtgaaaacaacggtttcggcggcaccagtgccaagctggagttcaaccaaccgctgcaggtcaagcatatcgcgctgctcgaagcgatgaacaagaagggtgatttcacctacttcggccgcaaagacgaatccaccgagaagttctacaacggcgattgcgccatcaccaccgcctcttccggttcgctggcggacatcaagcactacgccaaattcaactacggcgtcggcatgatgccgtacgacgctgacgcgaaaaatgcgccgcagaacgccatcattggcggggccagcctgtgggtgatgaacggcaaagacgccgccacctacaagggcgtggccgagttcctgcagtacctggcgcaaccggaaatcgccgccgaatggcaccagaagaccggctatctgccgatcaccaccgcggcttacgatctgaccaagcagcagggcttctacgacaagaacccgggtgccgacgtcgccactcgccagatgttgaacaagccgccgttgccgttcaccaagggcctgcgcctgggcaacatgccgcagatccgcagcgtggtggatgaggagctggaaggcgtgtggaccggcaagaaaacgccgcagcaggcgttggacgccgccgtgcagcgcggtgacgtgctgctgcgtcgcttcgaagcatcaaccaaataaccctgcgtcgcgggcccggcggaccgggcccgcgtcttcacgccgatccttccgtgcccgattaatggtttaactgctatgtcatcttcccgtcccggtttcggctgcagctggttgccctatgcgctggtgctgccgcagctgctgattaccgccgtcttctttttatggcccgccggcgaggcgctgtggtattcggtgcagagcctcgatccgttcggcctgtccagccagtttgtcgggctggataactttaagcagctgttccaggatccttactatctcgactcgttctacaccacgctgatcttcagcttcctggtggcgggcatcgggctggcggtctcgctgtttttcgccgcgttggtggactacgtgctgcgcggcagccgcctctaccgcacgctgatgatcctgccctatgcggtggcgccggcagtggcggcggtgctgtggatttttctgttcaaccccggtctcgggttgatcacccacttcctcaatgggctgggctataactggaaccatgcgcaaaacagcggccaggcgatgttcctggtggtgctggcctcggtatggcagcagataagctataacttcctgtttttcctcgccgcgttgcagtcgatcccgcgttcgctggtggaggcggcggccatcgacggcgccggcccggtacgccgcttcttccatctggtgctgccgctgatcgcgccggtgagcttcttcctgctggtggtcaatctggtgtacgccttcttcgataccttcccggtgatcgacgccgccaccggcggcgggccggtgcagtccaccaccacgttgatctacaagatctaccgcgaaggcttcgccggattggatctctccagctccgccgcgcagtcggtgatcctgatgctgctggtgatcggcctgacggtgatccagttccgcttcgttgaacgtaaggtgcgctaccaatgattgagaatcgacgcgggctggacatcttcagccatgtgatgctgattatcggcgtgctggtggtgctgttcccgctgtacgtggcctttgtcgccgccacgctggacgacaaacaggtgtttcaggtgccgatgacgctggtgcccggcggccacctgtgggagaacatccgcaatatctggcagggcggcgtgggcaacctcaaggtgccgttctcgctgctgttgctcaacagcgtgatcatggcgctggcgatcacctgcggcaaaatcgcggtgtcggtgctgtcggcttacgccatcgtgtacttccgctttccgctgcgcagcctgttcttctggctgattttcctcaccctgatgctgccggtggaagtgcgtattttcccgacggtggaggtgatctccaacctcaacctgctggacagctataccggcctgacgctgccgctgatggcctcggctaccgccactttcctgctgcgccagttcttcatgacgctgccggatgagctgctggaggcggcgcgcatcgacggcgccgggccgatgcgtttcttctgggacatcgtgttgccgctgtcgaaaaccaatctggcggcgctgttcgtcatcacctttatctacggctggaaccaatacctgtggccgatcctgatcaccagcgacgcctcgatgggcaccgcggtagcgggcatcaagagcatgatctccacttccggcgcgccgacccagtggaaccaggtgatggcggcgatgattctgactttattgccaccgctggcggtggtgcttctgatgcagcgctggtttgtgcgcggtctggttgatagcgagaaataacgacgatggcaggattaaaactacaggcggtcaccaagtcttacgacggtaaaacgccggtgatcaaacagatcgatctcgatgtggcggacggtgagttcatcgtgatggtcggcccgtccggctgcggcaagtccacgctgctgcggatggtggccgggctggaacgcaccaccagcggcgatatttatatcgatacccggcgcgtgaccgatctggagcccaaggatcgcggcatcgcgatggtgtttcagaactacgcgctctatccgcacatgagcgtatacgacaacatggcctacggcctcaagatccgcggttttggcaaggagcatatccgccagcgggtggaggaggcggcgcgcattctggagctggagccgctgctcaagcgtaaaccgcgcgagctatccggcggccagcgtcagcgcgtggcgatggggcgcgccatcgtgcgcgaaccggcggtgttcctgttcgatgaacccttgtccaacctggacgccaaactgcgggtgcagatgcgcctggagctgcaacagctgcaccgacgcctgaaaaccaccagcctgtacgtgacccacgatcaggtggaggcgatgacgctggcgcagcgggtgatcgtgatgaataagggcgtggcggaacagatcggcacgccgagcgaagtgtaccaacggccggcttcgctgttcgtcgccggctttatcggctcgccggcgatgaatttgctgcccggcaccctgagtgccgacggtagccagctgctgctggcggacggcatggcgctgccgttgcctgcggccaaaccgcagtgggcggggcggccgttgacgctgggcattcggccggagcatattcaattggtggcgcaaggccagggcgtgccgttgcagttgcagacgctggaactgctgggagccgacaatctggcgcacggccagtggggcggtcacggggtgatcgcgcggctgtcgcatgaaaccttgccgacggcgggcagtacgctatatttgcagctgcctgctcaggcgctgcacttctttgacacccacagcggattacggatggattgatgacgagaccctggccttaccctcatatcgttgcccaccgcggcggcggttctctggcgccggaaaataccctggcggcgatcgacgtcggcgcgcgccacggccacaagatgatcgagttcgacgccaaactggcgcaggacggacaaattttcctgctgcatgatgatacgctggatcgcaccagcaacggctggggcgtggcgggcgagctgccgtgggataagctggtgcagctggacgccggcaactggtacagctcggccttcaagggcgagcggctgccgctgctgtcggaggtggcggaacgctgccgggaacacggcctgatggccaatatcgagatcaaaccgaccaccggcagcgacgacgaaaccggccgggtggtggcgctggcggcgcggctgctgtggcaagggcagaccgacccgttgctctcctccttctcggtggaagcgctggcggcggcgcaacgcaccgtgccggatttgccgcgcggcttgctgctggaggactgggacgacaactggcgcgagctgaccgaacgtctggactgcgtctcgctgcatatcgaccacaaggcgctgaccgccgagcgggtgaaagcgttgaaagacgccggtctgcgcattctggtgtacaccgttaaccagcctgatcgcgcgcgcctgctgctcgactggggcgttgactgcatttgcaccgaccggatagatttgattggcccggagttctaatccggcgccgatgaatcctgcgacgacaagccttgccgccgcaccaccggaaggaatgcgatgcctggctttatcctgtcactgtggcaccagatggtgctgtcattaccgctgttcgtcctgatcgcgttgggttatgggctgattcgctgggggaaatggcccgccagcatcaccgatggcctgacgcgctttgtgttttccctcgccttgcccgccatgctgtttcgcatgatgtgcgacttctcgcagcgtccggcggtcgatgcccggctgttgatcgcgttcttcggcagttgcctgatcgtgttcgtgctcggccgcctggttgcccggtaccttttccggctggatggcgtcgccgggtcggtgtttgcgctgggcggtattttctccaataacgtgatgctcggtttaccgatcgccagcgtgatgctggggcaggcggcgatcccgtcggtggcgctggtgctggtgttcaacggcctgatcctgtggacgctggtcacggtgtcgatcgaatgggcgcgcaacggctcgccgacgctggggggctttgctaaaaccgcgcgcagcgtgctgaccaacccgctgatcgtcggcattttgtccggcacgctgtttagcctgaccggcctgccgctgccggacttcgtcgatcggccggtcagcatgctcggccaggtggcggcgccgctgtcgctggtggtgcttggcatggggctcgccgagtaccgcatcagcgaaggctggcaactgagcagcgccatctgcgtgctgaagttgctggtacagccgttggtgatttggctgctggcctggatgatggatctgccgccgatggagacccgcgtggtggtgctgctgggctcaatggcggtgggggtgaatgtctacctgatgtcgcgtcagttcaatacgctcaccggcccggccgccaccagcctggtgatgtccaccgtgctggcggcgatcaccacgccgctgatcctcaccgttatgggcgtgcgggcgtagccggcagcggggcctgcggcaccgccggcgcggtacggttgaacggatcgcgcggctggttgccgttaggcagcagctggccgccgttcggcgtggtttgcaacagctgttgccgttgattgtcgaactgtcgctgttgttgcaggcggcgttgatccatctgccggttgttcaacaagcgctgttgctgcgcctgttggctgttttggttgagaagccgctgctgtgaacgcagatcggttacgccgttggccgctgcagccaggccgggcagcaacagcagagcgaacaggatgtgagacgttttcatgatggttacctcgcttttttattaagcctaacccagcggtgaaattttgctggtagtttgtattttgttcaaatgtaaaccgccttttcgccaacgcggtgcccatcttccgttacaatcgcggtttatgaattgctaggatgaacccatcgtgctgctcttggttatcaccaccattctgtgggcgttttcttttagcctgatcggcgagtatttggcgggtcaggtcgacagcgggttttcggcgctggtgcgcatcgggctggcggcgctggtgttcctgccgttcctgcgctggcgcaatatcaagcccagggtgatcctgctgtatatgctggtgggcgccttccaactgggcatcatgtatctgttcagcttccgcgcctatctctacctgacggtacccgaattcctgctgttcaccgtgttgacgccgctgtacatcacgctgatctacgacttactgagcggccgacgtttacgctggggctatgtgttcagcgcgctgctggcggtgctgggcgcggcgatcattcgctatcaccaactgagcgaacacttctggtgggggctgctgttggtgcaggcggcgaacatcagcttcgccatcggcatggtcggctataagcgcctgatggaagtgcaccccttgccgcagcacaccgccttttcctggttctacctgggggcggcggtggtggcggtggtggcctggttcctgtggggcaatccgcagcagctgccgacgaccaatctgcagtggggcgtgctgatctggctgggcgtggtggcgtcggggctgggctatttcatgtggaactacggcgcgacgcaggtggatgccggcacgctcggcatcatgaacaacatgcatgtgccggccggcttgttggtcaaccttgccatctggcagcaacagccgcactggccgagctttatcatcggcggggcggtgatcgtcgcttcgctgtgggtgcaccgccgctgggtggcgccgaaacagctcggctaaacgggagggcgacagtttatacgccggccgccaacgctttggcgccggtcgcgccggggcgtgccgcgtcgcgcacgaacggcagatgatcgcaggcgtgctggcgggccgagcggataaaggcttcggtcaccgcctggcgctgttcgccgtcgcgcacggcggcgtacaggcggctccacaggccgtcacccagggttttggtcaccaccagcccctgccgttcgaaactctccaccacccaatgcggcagcgccgcaatccccatccgcgccgagaccatctggatcagcagcagcgtgttatcgacgttcttcaacgccgggttgacgcccgccggctgcaggaaatgccgccagatatccagccgctggcgctgcaccgggtaaatcaacagcgtttcatcgctcaagtctgccggctcgatgtgcggcttgccggccagcggatgatccggcgccagcaccagacgcacctcgaaatcgaacatcggcgaatagtgcaggccgctgcgcggcagaatatccgacgtcatcaccagatccagctcgccctgttgcagggccggctgcggatcgaaagtcacgccggaggtgaagtccatcaccacctgcgggaaacgctggcggaaattgtccagcgccggcgtcagccactgaatgcagctgtggcattcgatggcgatgcgcagcgtggtctggtgcggctcgtggcaggcctgcagcgcctgtgagatttgcggcagcacctgttccgccagctgcagcaagatctcgccctgggcggtgaagcgcagcggctggctcttgcgcacgaacagcttgaagcccagacgttgctcaagatcgctgaactggtgcgacagggcagactgcgtctgatgaagttgggccgccgcccccgccagcgaaccgctgctgcgcagggcctgcagcgtccgtaaatgtttcagttcgatcatgagagtccttcacattgacagtgaataaattgcgcttgtggttaatacagtacctgctgattatggatgtgtaaacatctggacggctaaatggggaataagacgatggcaattttgaatcacacactgggttttcctcgcgttgggctacgacgtgagctgaaaaaagctcaggaaagctactgggctggcaactcaacgcaggaagagctgttggcggttggccgcgagctgcgcgctcgccattggcaacagcaacagcaggccggggtggatttggtgccggtcggcgatttcgcctggtacgatcatgtgttgaccaccagcctgctgctgggcaacgtgccggcgcgccatcagaatgcggatggctcgatcgatctggacacgctgttccgcatcggccgtggccgcgcaccgaccggcgagccggcggccgcggcggaaatgaccaaatggttcaacaccaactaccactacatggtgcccgagttccaacaaggccagcagttcaagctgggctggacccaactgctggatgaagtggacgaagcgctggcgctggggcatcacatcaagccggtgctgctgggcccggtgacctatctgtggctgggtaaagtgaagggcgagccgttcgatcgcctgtcgctgctgaaagacattctgccggtttaccagcaggtgctggccgaactggcgaaacgcggcgtcgagtgggtgcaaattgacgagcctgcgctggtgctggagctgccgcaggcctggctggacgcctttaaaccggcttacgaagcgctgcaggggcaggttaagctgttgttgaccacgtatttcgacagcgtcggccacaacctcgatacggttcgcacgctgccggtgcaggggctgcacgtcgatctggtcgccggtcacgacgatatcgccgcgctgagcgccgcattgccgcaagactggctgctgtcgctgggcgtgatcaacggccgcaacgtttggcgcgccgatctgagccgctggttcgaacgtcttcagccgctggtgggcacccgcccactgtggatcggcagctcctgttcactgctgcacagcccgatcgacctgagcgtggaaagccgtctggatgaagaagtgaaaagctggttcgccttcgcgctgcaaaaatgcgccgagttggcgctgctggctgcggcgctgaacgcgcctgacgcggcgaagcaggccgaactggacgcctacagcgcaccgatccgcgcccgccgtcagtcgagccgtgtgcataacccacaggttgagcgccgtctggccgctatcaccgcgcaggacagcgagcgccacagcgcttacgccgagcgcgccagggcgcagcgcgaacgtttcaacctaccggcctggccgaccaccaccatcggttcgttcccgcagaccaccgagatccgcggcctgcgcctggatttcaaacagggccgtttggacggcagcaactaccgcaccagcattggagagcacatcaaacaggcgatcgtcgagcaggagcgcctcgggctggacgtgctggtgcacggtgaagccgagcgcaacgacatggtggaatatttcggcgagaacctcgacggcttcgtgtttacccagaatggctgggtgcagagctacggctcccgctgcgtgaagccgccggtgatcatcggtgacgtcagccgcccggaagccatcaccgtcgaatgggccaaattcgcccagtcgctgaccgacaagccggtaaaaggcatgttgaccgggccggtcaccatcctgtgctggtcgttcccgcgtgaagacgtgacccgcgaagtgattgccaagcagattgcgctggcgctgcgcgacgaggtggaagatctggaaaaagccggtatcggcatcattcagatcgacgaacccgccctgcgcgaggggctgccgctgcgccaatccgactgggccgcctacctgaactgggcggtggacgccttcaaattgaacgccgccgtggcgcaggatgacacccagatccacacccacatgtgttactgcgagttcaacgacatcatggactccatcgccgcgctggacgccgacgtgatcaccatcgagacctcgcgttccgatatggatctgctggaagccttcaaagagttcgaatacccgaacgaaatcgggccgggcgtctacgatatccactcgccgaacgtgccgagcgtggaatggatcgaagcgctgctgcgtaaagcggcgcagaacatcccggcggaacgcctgtgggttaacccggactgcggcctgaaaacccgcggttggccggaaacccggcagtcgctggccaacatggtattggcggcgcagcgcctgcgcgagcaggcgtgatggcgtgcggcggatgagctccgccgcttacagattgactggtgtgatgattgggcgcttcggcgcccttttttatgcgggggaggttacttgacgccgtgctgggcgaaccacgccagcatgcgctgccagccgtcttgcgccgcttcggcgttgtagctgggacgataatcggcgttgaacgcatgcccgacctcggggtacaccacgatttcggcctcggcgttggcggcgcgtatcgcctggcgcatggtttccaccgtctccagcggaatgccgctgtcctgcccgccatacagccccagtaccggcgccgacaggtgggtggcgacatcgaccggatgcttcggtgaattcagcgttttctcgccgaccagtttgccgtaccaggcgaccgcggccttcaactgcgggttgtgcgccgcgtacagccaggtaatgcggccgccccagcagaagccggtgatcgccagcttgccggcgtcgccgccgtggcggatagcccagtgcgcggcgtgatccagatccgacagcacctgacgatccggcaccctggtcaccaactgctggaacagctcgccgatatcgctgtagtcgttggcatcgccctggcgaaaatagagctcgggcgcgatcgccagatagccctgcttggccaggcgacggcaaagatcctgaatgtgctcatggacgccgaagatttcctgcaccaccagcacgatgggaaaggggccgttatggtcggcgggtttggcgacgtaggccggcagcgcgtcgccctgagaagggatggtcgtttgcccggcatgaatgccctgttcgtcggtgataatcgcggaggcggccaacggcgcggcggccggggcgaatcccccctgagcctgttctaatgtcatcacatgttcggttttcattgcggtctccgtgcaatagaaaaaagcgctgagattaactataggaaagattacccattattggcgctgcgtggcgcactttcggacaagtcgataaaaaacggctaattatctggctttgcggcatttttaagcgctttttatcatgttattacgcgttttggcccgcgtaagtgccataaggtgcgttagagggcttttttgcccctaagcaaccgataagatggagttatttcggattgatgagctaaatagtttcagccggcaaccaacgggcagggagctgcaaggtttgtcggctagactgaggtttagcggtgcattctggatgccttatagtgatagtgattttttgtgataaaaatcacaaaaaatatgtagcatgtaatttgtttctcttttcatagtgactgtcgtcacgaaattaagcggcgattttcagtagagtgcttttttgttcctcccaataaacatgatccatgaggagtctcgtatgtctcagtctgacgtttttcatctcggcctcaccaagaacgatttacaaggggcccagcttgccatcgtgccgggcgatccgcagcgcgtagagaagattgccaagctgatggaaaatccggtgcatctggcctcccatcgtgaattcaccacctggcgcgcagagctggacggcaaggcggtgatcgtctgctccaccggtattggcggcccgtctacctctatcgcggtggaagagctggcgcagctgggcattcgcaccttcctgcgcatcggcaccaccggcgccattcaggccaatatcaacgtcggtgacgtgctggtgactacggcggcggtacgcctcgacggcgccagcctgcactttgcgccgatggagttcccggcggttgcggacttcgcctgcaccaccgcgctggtggaagcggccaaagccagcggcgcgaccacccacattggcgtaaccgcttcttccgatactttctacccgggccaggaacgttacgacacctactccggccgcgtggtcagccgttttaaaggctcgatggaagagtggcaggcgatgggcgtgatgaactatgaaatggagtccgccacgctgctgaccatgtgcgccagccagggcctgcgtgccggcatggtggctggggtgatcgttaaccgcacccagcaagagatcccgaacgccgagaccatgaaaaacaccgaaagcaaagcggtgcagatcgtggtggatgccgcccgccgtctgctgtaatcgcctcccctgaacgggccgccgccgcggcccgtttttccattcgcgactaatctgttacggtgatactcctcagcgctgcgccgatggccgccgcgcgttgtcataacaaaaacaacgaggacgtttatgaccgcccagatcctgcttcatccttcgcttgcgccgctcgacggcggcattaatttccgtgacttcggcggcaacggcgtggccgacgggcgccgcatcaagcgcggcctgctgtttcgttccggttccctcgagcggctgacggaaaacgactgcgcctttctcgccggcgtgccggtgcgttcggtgctggactaccgcgatgccgacgaagtgcaggccaaaccggatattctgtggaatggcgccgactatcatcacgtgccggccaacccgctgagcagcgaagtcaacgccaacctggagaagctcaccaacgaaacgctggccgctttcgacgcccgcgcgttcatgctggaactgtatcgccgcctgccgttcggcaatgtggcctatcagcggttggcgcagctgctgagcaaccccggcggcggcgcgatcgtgcagcactgcgcagtcggcaaggatcgcaccggggtcggttcggcactggtgctgttcgcgctgggggccgacgaagcgacggtgctggaagactatctgctgactgaaaccacgctggccactttccgcgagcagatgctggatcagctctctatcaagctgaatgcggcggcgctggagcaattcgcctacgtgctcagcgcgcgcgaggagttcctgatgacggcgctgggctgcatccgtcagcaatacggctccaccgaccgctggctggaagcggaatacggtctgggcgcggcccagcgcgaagcgctgcaggcgttctacctcgagtaaatcgctgcgtgtttaaccggggtttaactcgccccggcttatcctaggcggcgaaccatcgcgtatcaggagccccgtattgagcctcaatgacgttatcaactgggtcagcgacgtcgtgcgtcagcacgaaggctgggccattcccatcatcttcttcctggcgttcggcgagtcgctggcgtttttgtcgctgctgctgccggccacggtgatcctgctggcgctgggcgcgctgatcggcgaaagcggcatcgccttttggccgatttgggccgccgccgccgccggggcgtttttcggcgactggctctcttactggatcggctatcactatcaggatcgcgtggcccatatgtggccgctgtcgcgcaatccgcagctgctggcgcgcggccacgccttctttgaacgctggggcgtgctgggcattttcatcggccgcttcttcggcccgctgcgcgccgtggtgccgttggtgggcggcatttgcggcatgccgcagcgctatttccaactggccaacgtcacgtcggcgatgatctgggcgttcggcattctggcgccgggggcgttcggcatcaagtggctcagccagtggctgggttgatttctcgctaaattgcgcagcgccgcgcaatattgtgcgcggccggcaaaatcaggctggacatccatacagcctccccttaacgtgacgggcaatgggcgtgcaaaacgccgcaacggcaaggtgcaacaggaggcagggtggataccagtctgatttatgggattggcggcgtagcgatcggcatgctgttggggtggctgatcgccagtctgcgggtgcagcagacgcatgcgcaacatgaaaccgagctgcggttgctggagcaagcgttgcagcaggcgcagcaggaaacggcggcgcggcaggaaacgctgcagcgccacgaacagcagtcgcgccagagcgagctggagctgcgcaatctgcacagccaactggcggccggacatgagaagctgcaacagctcaaccattggcgcaacgaatgcgaactgctcaatcaggagctgcgcgcccagcgcgaggttaacagcgcgcaggaagccgaactgcgcgaagtcaccatccgtctggaagagacgcgtatggcagcggaggagaagcagcgcctgcttatcaacagcgaacagcggctcaccacccagtttgaaaatctcgccaaccgcatttttgaacacagcggccgcaaggtggacgagcaaaataagcaaagtttggatcgtttactgttgccgctgcgcgaacagctggacggtttccgccggcaggtgcaggacagctttggccaggaggcgcgggagcgccatacgctgacgcacgagatacgcaatctgcagcagttgaacgcgcagatggcgcgcgaggcgatcaacctcaccaaggcgctgaaaggcgacaacaaaacgcagggcaactggggcgaggtggtgctgagccgggtgctggaggcttccggcctgcgcgaaggacatgagtatgaaacgcaggtcaacgtgcgggtggatcatcagagccgcatgcagcccgatgtgatcgtgcgcctgccgcagggtaaggatgtagtgattgacgccaagatgtcgctgatcgcctacgagcgctatttcaacggcgaggatgaggcggagcgcgaagcggcgctgagcgaacatatcgcctcgctgcgcggccacatccgcatgctgggccgcaaggactatcagcagttgccggggctgcgttcgctggattatgtgctgatgttcattccggtcgagcccgccttcctgctggctatcgatcgcgagccggagctgatcagcgaagcgcttaagcacaacatcatgctggtcagcccgaccacgttgctggtggcgctgcgtaccatcaccaacctgtggcgctatgagcatcagagccagaacgcccagcgcatcgccgatcgcgcggcgaaactgtatgacaagatgcggctgttcgtggacgatatgtccgcgctggggcagagcctggacaaggcgcagggcagttatcgtcaggcgatgaacaaactgagcgaaggccgtggtaatcttatcggccaaattgaaggtttccgcgcgttgggggttgaggtcaaacggccgataaacccgctgctggcgcagcaagccggcgcgcaacacgatgaagcggaagaggcgaacgacgatgatgtcgccgcgctgccgcagacgaacgacgatgacgataccgccggggaaccgggcttcgtttcgcacggctgaggccgtggcgaggtggggtattcaccgggcttctggtacactcatccacacaaaattgactgaatagcaggcaggacaatggcagatcaatcgcaggaaaccaccgatttcggttttcgcaccgtcgctagagacgaaaaacaggccatggtggcggacgttttccattcggtagcggcaaagtatgacgtgatgaacgacctgatgtcgttcggtattcaccgtatctggaagcgtttcaccattgactgcagcggcgtgcgccgcgggcagcgcgtgctggatctggccggcggtaccggcgacctggccgccaagttctcccgcatggtgggcgagcaggggcaggtggtgctggcggacatcaacgattcgatgctcaagatggggcgcgagaagctgcgcgatcgcggcatcgtcggcaacatcaattacgtgcaggccaacgccgaagcgctgccgttcccggacaattacttcgattgcatcaccatctcctttggcctgcgtaacgtcactgacaaagacaaagcgctgcgctcgatgttccgcgtgctgaagccgggcggccgtctgctggtgctggaattctccaagccgctgctggcgccgctgagcaaagcctatgacgcctactctttccacgtgctgccgaagatcggcgagctggtggtgaaagatccggacagctaccgctacctggcggaatcgatccgcatgcaccccgatcaggaaaccctgaagggcatgatgggcaacgccggttttgaaaacgtcacctatttcaacctgaccggtggtattgtcgccctgcatcgcggcttcaagttctgagagggagatgccgatgctgtttacccctctgctgaccggtgcgctggaaacctcgctgaataacctgctgtttcgcgatcgcagcatgaaagccgcccgccaacgcctggcgggcaaggtgctgcgcatcgaactggaagagttggcttcgccgctggtgctggtgttcagcgaactgcgcgtggatgtgctggggcagtctgaagacagcgccgattgcaccgtgcgtagccgcattccctccttgctgaagctgcgcgatcgccagcagttgccggtgctgatgcgcagcggcgaattgacggtggaaggcgatattcaggtggtgcaacagctggttggcctgctcgatctggcggagtgggatccggcggagtggctggcgccctacatcggcgatatcgccgcccaaggcattacacaggcgctgggaaaaggcgcctcgctgctgaaagccggctttatgcgccggcagcaagacatggctgaggcgttgacagaagagtggcgcctggcgccggggccgctggaagtggtgtggttcaacgaagaagttgacgcactcgcccgcagcgcggaagcgctgattgcccgcatggacaagttggagggcaagcgatgaccccaggcgaactgcgccgtttgtattttatcgtccgcgtttttctcagctacgggctggacgagctgatccctaaaatgcggttgacgctgccgctgcgctttggccgccggctgctgttctggatgccgaatcggcacaaggacaaaccgctgggtgaacgtctgcggctggcgctgcaggaactggggccggtctggatcaagttcggccaaatgatgtcgacccgtcgcgatctgtttccgccgcacattgccgatcagctgacgctgctgcaggatcgggtggcgcctttcgatggcgcgttggcgcgtaagcatatcgagctggcgatgggcggcccgctggagacctggttcgatgacttcgatcagcagccgctggcctctgcctcgatcgcgcaggtgcataccgcgcggttgaaaaccaccggccaggaagtggtgctgaaggtgatccggccggatatcgggccgatcatcaaggccgacgtgcgtctgatgtaccggttggcaggctgggtgccgaagctgttgccggacggccgccgtctgcgcccgcgcgaagtggtacgcgagtatgagaaaactctactggacgaattgaacctgctgcgcgaagcggctaacgccattcagctgcgccgcaatttcgacggcagcccaatgctgtacgtaccggaagtttattccgactactgccgcgaaagcgtattggtgatggagcgcatttacggcattccggtctcggacatcgccacgctggaacagcagggcaccaacatgaaactgttggcggaacgcggcgtccaggtgttctttacccaggtcttccgcgacagcttcttccatgcggacatgcatcccggtaatattttcgtcagctacgaacatccggaagatccttgctacatcggcatcgactgcggcatcgtcggttcgctgaacaaggatgataaacgctacctggcggaaaacttcatcgccttcttcaaccgcgattaccgcaaggtggcggaactgcacgtcgactccgggtgggtgccgcgcgacaccaacgtggaagacttcgaattcgccatccgcaccgtgtgcgagccgattttcgagaagccgctggcggagatttccttcggcaacgtgctgctgaacctgttcaacaccgcgcgacgcttcaatatggaagtgcagccgcagctggtgttattgcagaagaccttgctgtatgttgaaggactggggcgtcagctctatccgcaactggatctgtggaccaccgccaagccgttcctcgagagctggctgcgcgatcaggtcggcattcccgccgtggtgcgtgcgctgaaagagaaagcgccgttctgggcggagaagctgccggaactgcccgagctgttttacgacagcttgcagcagcataaactgttgcaacaaagcgttgataagctgaccaaccagatgcaggctcagcgggttcgtcaggggcagtcacgttatttgttcggcgttggcgctacactgttggtaagcggcacgctgttgctgctggggcaaatcgaggtgtttcccgcctggatgatggccgccggcatcgtatgctgggtgattggctggaagcgaaccacctgatttaattcgttactctggtaaagtcggctctataatgcgggctggctttaaaagaccctttaaaattagaggtaattaaaatgggcggtattagtattacgcaattgttgatcatcgcagtgatcgtggtgctgttgttcggtaccaaaaaactgcgcacgctgggctccgatctcggcgcctcgatcaagggcttcaagaaggcgatcggcgacgatacgccatcgacccccaacacggctgagaaaagcagcctggatgacgctgacttctcggccaagcctattaccgataagcagccggaagtgaaaccggaagagtcgaagaacaaagagcaggtataaaccgtgtttgacattgggtttagtgagctgctgctggtgctggtaatcggcctggttgttctggggccggaacgcttgccggtcgcggtcagaacggtatcgggctggatccgcgcgctgcgctcgctggcggcctcggtgcagcacgaactgtctcaggagctgaagctgcaggagctgcaggacagcctgaaaaaagcggaacaggccggcctgcagaacctgacgccggaactgaaggcgtcgatggatgagctgaaagacgcggcggaatcattgaaacgcacctaccagggcgagaaagaagagctggcgaacaccattcataacccgcagatcaccgatccggaagccttgcacgacggcgtgacgccggcggaagcggcaacccgcgccagtgcgcccgccgccgcgccaaaaccggcagcggaacctgaagccgtcgcgcccgtgtcaccagcaccgccggtggcggcgcaaccggctaaggcgccggcggaaaccgcgccggcacctgtcgaacctgttgcggataaaaccccagcgtctcaccaacctagtggcgatcgttaatacatggctgttgaagatacccaaccccttatcagtcatctgatagagctgcgcaagcggctgttgaactcgattatttgcgtgctggcggtgttcgtggtgctggtgtttttcgccaacgacatctaccagttggtctctgcgccgctgctcaagcagctgccggccggggcgagcatgatcgctaccgacgtggcgtcaccgttctttacgccgatcaaattgaccatgatcgtctcggtgttcgtctccgcaccgatgattttgtatcaggtgtgggcattcatcgcgccggcgctgtacaagcatgaacgccgcctgatgatgccgctgctggtgtccagcagcctgctgttctacctcggcatggctttcgcctacttcatcgtgttcccgctggccttcggcttctttgccaagaccgcgccgatgggggtgaccattgccaccgacatcaaaaactacctcgatttcgtcatggcgctgtttatggcgttcggcgtcgctttcgaagtgccggtcgccatcattctgctgtgctggagtggcgtcacctcgccggaagatctgaagaagaaacggccgtatgtgttggttggcgcgtttgtggtcggcatgctgttgacgccgccggacgtgttctcgcaaaccctgttggcaataccgatgtatctgctgtttgaagtgggggtgttcttcgcccgcttctataccggcaaacgtcgtccgcaggcggaagaagaagacgagggtgacgaaccgccagctccctgatccatcttgattgcgaagccgcccattgggcggcttttgctttggaaaaaatcatgtttgatatcggcgttaatctcaccagcagccaattcgccaaagaccgccaggcggtggtggagcgcgcccgcaccgcaggggtgaccgggatgttgattaccggcaccgatctgccggagagccgcgaagccgccgaactggcgcaacaacatccgggctacggttggtctaccgccggtgtgcatccgcattacgccagcggttgggatgaacacactgccgagcagatttatgcgttagccgcacgccctgaagtggcggcgatcggcgaatgcggcctggattttaatcgcaacttctcgacgcccgtacagcaggaagcggcgttcaccgcgcagctggcgctggcggcggagttggcgctgccggtgtttcttcattgccgcgacgcacacgcacgttttgccgagctactgacgccgtggttggataaactgcccgcggccgtggtgcactgcttcaccggcaccgccgaagaattaacaagctgcctgtcgttgggcctgtcgatcgggattaccggttgggtctgcgacgagcggcgcggcctggaattgcgtgccctgttgccgcagatcccggccgagcgtctgctgctggaaacggacgccccttatctgttgccccgggatttacagcctaaacccgcatctcgccgcaacgaaccctgtttcctgccccatatcgtgcatcaggtcgccgtctggcggcaggaagagccgcaatggctggggcaaaaaaccgatgagaacgcccgccggctattccggctggtttgagctaggagaaaactatgagctatgtatttccgggcaccttccctggtcgccgtatgcgccgcgtgcgccgtcacgacttcagccgccgcctggtggccgagaatcaactgacggtcaacgacctgatttatccggtgtttgtcatggaaggcagcaaccgccaggaagaagtggcctcgatgccgggcgtatcgcgcatgacgatcgatctgctggtgaaggaagcggaaaccatcgccaaacttggcgtgccggtgatttccctgttcccggtgatcgaaccgagcctgaaatcgctgcatgcggaagaagcctataacccggaagggttggtacagcgcacggtgcgcgcgctgaaagacgcggtgcctgaactgggcattctgaccgacgtggcgctcgatccctacaccacgcatgggcaggacggggtgatcgatgagcagggttatgtgattaacgacgtgaccaaagacattctggtgcgtcaggcgctgtcccatgccgaagcgggggcggaaatcgtggcgccgagcgacatgatggacggccgcatcggggcgatccgcgatcgtctggaattgcagggcctggtgaatacccaaatcatggcctactccgccaagtatgcttcctgctactacggcccgttccgcgatgcgttgggctccagcggcaacctgaagggcggcaacaagaagacctatcagatggatccggccaacagcgacgaagcgctgcaggagattgcgcaggatctgcaggaaggtgcggacatggtgatggtgaaaccgggcatgccgtacctcgacgtcgtgcgccgtgtgaaggataccttcggtgtgccaaccttcgcttatcaggtgtccggcgagtacgccatgcatatggcggcgattcagaacggctggctgcaggagcaacctgcggtgatggaatcgttgatgtgcttcaaacgcgccggcgccgacggcgtgctgacctacttcgccaagcgtgtcgcgcagtggctgcacgacgatgcgatgcgtcgctaagcgcaaaatgagccaacaaaaaggcgcctgagggcgccttttgcattacatcttctggaactgtcggttgtcgatgctttgactgacctgcttgttgatcaggttcagcaacaacatggaacgcgcctcgccgtccggttcggtgtagatcgcctgcagcccttcgaacacgccgtcgacgatcagaacggtatcccctggctgtggggtttccggatcgacataggtttcgctggcgtgcgtgcgcagctcatcgatcaccttgctcgggatgacgctcggcaacgtgccgaaacgcacgaagtggctgacgccacgggtggcgctgatggtggtggtgtgaatgcgctccggatcgaactccacaaacagatagttgggaaacaggggttcgctgaccgcgatacgcttaccacgcacgatcttttccagcgtgatgatcgggctgaggcagtttacctgctgccgctccagatgttcctgcgcccgcaacagctgaccgcgtttgcaataaagtagataccaggattccataatttcacatgcctttctgccagccggtaagcatatcaaaagctattccggatacatagtgatgcaagtttcagtgtgtaacatcacctatctctatgaatctgcggctattagcgaggggtcacacacttatcgatacggtgctggtataacagagggctaaaaatttgttaccgtcacagtatggcaggcgctgcgccgccggctgtgacgttattcatcgttttgaccgagagggaaagaaatggagctgtttctgttgagcaacggcaagctgtctggcgaagccgagctgctggggtacgccaaaagccaactgctggcgatgattgcgcgtcgcggcatcaaatccgccgtctttatcccttacgccctgatccgttacgactacgaccagcgtgcgcaggaactggcgcaaacgctgggcatcgaagtcaccagcatccaccacgccgcttcgccggcggcggcgatcgcgcaggcggagtgcattttggtcagcggcggcaatacctggttgctgaaccaaatgctgcacgaacaaggcctgatcgtgcccatccagcgcgcggtgcgcgagcgtgaagtgccttacgtcggctggagcgccggttgcaacgtggccacgccgagcattcgcaccaccaatgacatgccggtgcgctgcagcgtggtgctgccggcgctggggctgttcccggcgcagatcaacccgcactacatcgacgcacatatcagcggccacatgggcgaaacccgtgacgagcgcctggcggagttctgcgcggtcaatccaagcgagtcggtggtagcgctgcgtgaaggtagcctgctgcacgttgaaggcaatgcgctgcgttacttcagcgctaacgggcagggcttcaaggtgttccgccacggtgaggagacgcgtgaatatcaggatacgcgcgcgctggctgcgctggtgccgttcaactgcggctgagggccacccggcggcgggcggcgttaacaaaattgcagcaacaaccgtgaagagggcttataatgccctccccactggccgttataatgatcagcatgaaataccgtgacttacgcgatttcctctcgttgctggagaagagaggggaactaaaacgcatcagccagccgatcgatccttacctggaaatgacggagattgccgatcgcaccctgcgagcgggcggtccggcactgctgtttgaaaacccgaaagggtatgacatgccggtgctctgtaacctgttcggcaccgccaatcgcgtggcgatgggcatggggcaggaagacatcagcgcgctgcgcgaagtcggcaaactgctggcgttcctcaaagaaccggagccgccgaaaggcttccgcgatctgttcgacaaaatgccaaagttcaagcaggtgctgaacatgccgaccaaggtgctgggatccgcgccttgtcaggagcaggtatggcagggtgacgatgtcgatctcagccgtattccggtgatgcactgctggccggaagacgctgcgccgctgatcacctgggggctgacggtgacccgcggcccgcataaggaacggcaaaacctcggcatctatcgccagcaggtgctgggcaagaataaagtgatcatgcgctggctgtcgcatcgcggtggcgcgctggattatcaggagtggtgccaggcgcatccgggcgagcgtttcccggtcgcggtggcgctgggcgccgatcccgctaccatcctcggtgcggtcacgccggtgccggataccctgtctgaatatgcctttgccgggctgctgcgcggcaataaaaccgaagtggtcaagtgcctttccaacgatctggaagtgcccgccagcgccgaaatcgtgcttgaaggctatatcgagccgggtgaaatggcgccggaaggcccctacggcgaccacaccggttactacaatgaaatcgaccagttcccggtgttcaccgttacccacatcacccagcgccgcaacgcgatctaccactcgacctacaccggccggccgccggatgagccggcgatcctgggcgtggcgctgaatgaagtgttcgtgccgatcctgcaaaagcagttcccggaaatcgtcgatttctatctgccgccggaagggtgctcgtaccgcctggcggtagtgaccatgaaaaaacagtacgccggccacgcgaaacgcgtgatgatgggcgtctggtcgttcctgcggcagtttatgtacaccaaatttgttatcgtctgtgacgatgacgtcaatgcgcgcgactggaacgacgtgatttgggcgatcaccacacgaatggatccggcaagggatactgttctggtggagaatacgccgatcgactatctggacttcgcctcgccggtttccggcctgggttcgaagatggggctggacgccaccaataaatggccgggtgaaaccgatcgcgaatggggccgtccgattcagatggatgaaaaggtacgtgcgcgcgtcgacgaaatctgggatgagctcgcaatcttcagtgacagggaaccgacgttatagcgtcaggccctgttctcagctttgcattgatgacccgacagagggaacgcatgacaatattgagctgtaaagtgacctcggtagaggccattaccgatacggtttatcgggtacgtctggtgcccgaacagccgttttctttcaaggcagggcaatatctgatggtggtgatggatgagcgcgacaagcgcccgttctcactggcatcaaccccgacgcagcaagattacatcgagctgcatatcggcgcttcggagctgaatctgtacgccatggcggtgatggatcgcatcctgaaagagcaggcgatcaccgttgacgtgccgcatggcgacgcctggctgcgggaagagggcagccgtccgttggtgctgatcgccggcggcaccggtttctcttacgcgcgttcaatcctgttgaccgcgctggagcagcagccggatcgcgacatttcaatctactggggcgggcgtgagctgaagcacctgtacgatttgagcgagctggaagcgctgtcgttgcagcatccgaatctgaaggtgatcccggtggtcgagcagccggaggctgaatggcgtggccgcagcggcaccgtgcttagcgcggtgctgcaggatttcggcacgctggcggagcatgacatttacatcgccgggcgtttcgagatggcgaaaatcgcccgcgagcgtttctgcgccgagcgcggcgcgctggaagcgcatatgtttggcgacgcgttttcgtttatctgacacaggcgatgcgcagtgaacggggtggccgagggtcgccccgtttttatttgggcgtcggcaaatttcaggcataaaaaacccgcccctgacaggcgggaagaacggcaactaaacttggcgggatgccgcgatttgaagtggtgacgcggtcatcccaagatagacacagctaaacgcgttcaaacacggtggcgataccctggcccaggccgatgcacatggtcgccaggccgaactgcgcgtcgcgacgttccatgttgttcaacagggtggtcgagatgcgggagccggaacaccccagcgggtggccgagcgcgatggcgccgccgttcaggttaatcttgtcgtcgatgctgtccatcagccccagatccttgatgcacggcagcgactgggcggcgaacgcttcgttcaactcgaacagatcgatgtcctgcacgctcagaccggcgcgtttcagcgccagcttgctggccggcaccgggccgtagcccatgatggacggatcgcagccgacgaccgccatcgagcggatgcgggcgcgggccttcaaaccgagcgctttggcgcgcgattcgctcatcagcagcatggcggaagcgccgtccgacagggcggaggagctgccggcggtgacggtgccgttgaccggatcgaacgccgggcgcagggccgacaggctttcgacggtggtctccgggcgaatgacttcatcgaaatcgtaacgggtcagcacgccgtcggcgtcgtggccgttggtcggtatgatctcgtttttaaagtaaccggccagcgttgctgcatgcgcgcgctggtgggagcgggcggcaaattcatcctgcatctggcgactgatgttgtgcatcttggccagcatttcggcggtcagccccatcatcccggcggccttggccacgctgcggctcaggcccggatggaaatccacgccgtgattcatcggcacatggcccatgtgttccacgccgccgatcaggctgatgtgcgcgtcgcccaccatgatggcgcgtgccgcgtcgtgcagcgcctgcatcgaagagccgcacaggcggttgacggtcaccgccggcacgcggtgcgggatctcggccagcagcgcggcgttgcgggcgatgttgaagccttgttccagcgtctgctgcacgcagccccagtaaatgtcatcaatctcggcggcgtccagcgccggattgcggctcagcacttcacgcatcaggtgagcggagagatcttcggcgcgtacctggcggaatgcgccgcccttggagcggcccatcggcgtgcgtacggcatcaacaataactacgttttccatctttatgacctcatgccggttggcgggtagcgacgtcggacagcggtgtcgccaccgggtagtagctttcattgcgttcggccttggcgcgcagaccggccggcacctggtacagggcgccgaggtgtgcgtaacgctgggccagctcaacgtagttggcggtgccgagcgtatccaggtagcggaacgcgccgccgtggaacggagggaaaccgatgccgtagaccaacgccatatcggcttcggccgggctggcgacgatattttcttccaggcaacgcaccacttcgttgatcatcgggatcatcatgcgcgcgatgatttcttcgtcgctgatggtctggcgcggttggctcacttcggccagcagcgcatcggtctgctcatcgttgtccttgcgcggtttgcctttgctgtcctggctgtagcggtagaagcccagttgatttttctgaccgaagcgctggttgtcgaacatcacgtcaatggcgtcgcggtagtctttgctcatgcgatccgggaaaccggcggccatcacggcctgcgcgtggtgcgcggtgtcgatgcccacgacgtcgagcaggtaggccgggcccatcggccagccgaactgtttttccatcactttatcgatttgacggaagtcggcgccgtcgcgcagcagcaggctgaagccggcgaagtacgggaacagcacgcggttgacgaagaagcccgggcaatcgttcaccacgatcggcgttttgcccatgcggctggcgtaggccaccactttggcgatggtatcatcgctggtctgttcgccgcggatgatttcaaccagcggcatgcggtgcaccgggttaaagaagtgcatgccgcagaagttttgcgggcgcttcagcgattttgccaggtgattaatcggaatggtcgaggtgttcgacgccagaacggtgtcttcaccgatcaggccttccacttccgacagcacggcggctttgactttcggattctcgacgaccgcctcaacgatcacctgcgcgcgctcgatgccggcatagtccagcgtcggctgaatggtcgacagcacctgcgccattttcaggccatccagcttgccgcgctccagctgcttgttgagcagcttggccgcttctctcatgcccagcgtcagcgacttgtcgctgatgtccttcatgatcaccggtacgcctttcagcgccgattggtaagcgataccgccgcccatgatgccggcgcccagcaccgccgcctgttttggcgcatccacattcttggccagctttttcgcctggcccttcacgaactgatcgttaaggaagatgccgaccagcgcgcgcgcttcgttggagcgggccaacggcacgaagctggcggtttccagtttcagcgcttcatcgcggcccagcttggcggcggcttcaatggtcttcaccgcggtcatcggcgccgggtaatgtttaccggcggtctgcagtaccatgcctttggcggtggtgaagctcatcgccgcttcaatcgggctgagtttcagcggctccagcttaggttgacgcgcggcgcgccagtccagcttgccgtcgatcgcctgttgcagcatgttgagcgccgcttcggccagtttttccggcgccactaccgcatcgaccaggccgactttcaacgcgtctttggcgctgacgtctttgccggcggcgatgatttccagcgcgctgtcgttacctagcaggcgtggcagacggacggaaccgccgaagcccggcatgatgcccaatttggtttccggcaggccgatgcgcgcgtccggcgaggcgacgcggaaatcggtcgccagaatgcattcgcaaccgccgccgagcgcatagccgttaatggccgaaatggtcggtaccggcaaatcttccagccggttaaagacgttgttggcgaataccagccactcgtgcagcttttcagccggtgcggcaaacagagaaaggaattcggtgatatcggcgccgacgataaatgcggctttggtggagcgcagcagcagccccttgagctcaggctggttttccagcacggtgagcgcctcgcccaggctggcgacggtgcgggtgtccagcttgttgaccgagcctgatgcgttgaacaccagctcggcaatgccgttatcgagccagtgcagttgtaatgtttcgccttggtagagcatgtctatctcctgaatcagcgtatgatctggtatgaccagatgaagaggagtgtggtttttatgttaaaaatatgcaaatgagagattgcatatttgctggtctgatcacatctcaccaagttagtgttttgatttaaaacggagttatattttatgtgctatcggcatttgctggagtttgtcggccctcatacacttgctcgcagcgattgatcattcagacgaggtaaggcatgactaaggcggtttgtgtcaaacgcagcggcttatggagcattcccgccagaaccatgacgctggcgtgtctgttggtgtttatggcgcagatggcgacgaccgtgtatctgccttcgctgccgacggtgatgcgcgagctggcgatgagccggcgcgccaccgagctgtccatttcgatcttcgtcatcggcgctgccttgccggtgctgttctggggcgcggccgccgatcgctttggccgccgagcgccgctgacgctttccctgctgcttttcattggctgcagcgggctgttggcgctgtgcagcaacggtacccaattactggcgctgcgtgcgctgcaaggtgtgggtgccggtggtgcggcgatcattgcgcgtatcatcgtgcgggataactggagcggtgatgagctggcgcgccgtctgtcggtgctctccatcgcttttatcaccgcgctgggcggcggtcagtttgtcggcggcctgctcagccaatattcgcactggcagatgggcttcgtcctgatgggcgccaccggtttggccattctggcgctgatggcgacgctgccgctggaggcgggacgggcagggggcgtgcgcccggcgatggcggcaacctactttgccatcctgcggcggccggggttcttctggccggcctgcgtcggcggattgggcttcgccaccacggtgacattgcaggaggtgagtccgttcgtcatgcagcagggttttggtctcaacgttacggcgttcggtgcgctggggctggtgatcggcgtcgcctacttcagcggggcgctgacggtgaaccgcacggtggcgcgtgtcggcgggaaaaaactgatgcaggccggcagcggcatcgtggcgctggcgacggcggcgatcctgctgttgtggtggagcggcgtcctggccggcctttccggcatggcgctgttcatcgcgctgtattgcctgaccatttttggccaggcggtgctgtttcccaacagcatggcgatggccgtcagcgatgccaaagagtacggcgcttatgcgatggcgctgtgtggctttctgcagcagtgtctggcgggcgtcgccgcggctggcgcggtgttgttggaacaccatggcctgtgggcgctggcgatagcgctgctcggtttgggcggctggttaatggttaagctgcggatgtaacggcatttgcagggaattgcgagctgctccgcatgcccaacgcgatgaggttggtgcgccggagcgctgtgttaagatgacttctttcgtgctaaggcataagggtactgtgatggaaacgctggcttctttgtataacgaccacctggcagagctgcaaaaacgcgcgcgcgaagtgctggagcgcaacaagttggatgcgctgctgattcactccggtgagctgcaaaaggtatttttggacgaccatagctatccgttcaaagtgaacgcgcatttcaaagcctgggtgccggtgacgtcggtgccgaactgctggttgtggatcgatggtgtcaataagccgaagctgtggttctactccccggttgactactggcacagcgtagagccgctgccgaacagtttctggaccaagtccctcgaattgatgccgctggccaacgccgatgcgatcgcgcagcagctgccgtcgcagcgtgagcgcgtcggctatatcggttatgcccaacagcgcgcccgcgatctcggcatcccttcggaaaacatcaacccgaaagcggtgctgaactacctggatttccaccgttcgattaaaaccggctatgagctggcctgcatgcgcgaagcgcagaagacggcggtaaccggccatcgtgccgcgcatgaggcgttcctctccggcatgagcgagttcgacatcaatctggcctacctgacggctaccggccaccgcgataccgacgtgccttacgacaacatcgtagcgctgaacgaacacgcttcggtactgcactacaccaagctggatcatcagccgccggccgaacccctgagtttccttatcgacgccggcgcggaatataacggctatgccgccgatctgacccgcacctacgcggcgcaaagcggcagcgagttcgcccacctggtgaaagatctcaatggtgaacagctggcgctgatcgacaccatcaagcccggcgtgcgctataccgactaccatgtgcaaatgcatcagcgcatcgccaagctgctcaagaatcacaagttggtgaacggcctcagcgaagaggcgatggttgaaacgggtattaccacgccgttcctgccgcacgggctgggccatccgctgggccttcaggtgcacgacgccgccggctttatgcaggacgagcaaggcacccatctgccggcgccgtccaagtatccattcctgcgttgcacccgcgtgttgcagccgggcatggtgttgaccatcgagccaggtctgtacttcatcgagtctctgttggcaccgtggcgcagcggtgaattcaagcagcacttcgcctgggatcgcatcgatgcgctgaagccgtatggcggcatccgtatcgaagacaacatcgtgatccacgaaaagcgcatcgagaacatgacgcgcgatctgaacctggcctgatgcggccttacccgataccggcggaagccacctgctttaccgaagaaataaagaagagccgttttatcaccctgctggcgccgaccagcggggtagaagcggcaaaggcgtttattcagcaggtgcgggatgagcatccggcggcgcgacaccattgttgggcttgcgtcgccggcagccccgatgattcgcagcaactggggttctcagacgacggagagccgtcgggcaccgccggcaaaccgatcctcgcgcagctgatggggagcggcatcggtgaagtgaccgccgtggtcgtgcgttactatggcggcgtcaagctgggcaccggcgggctggtgaaagcctatggcaacggtgttcaacaggcgttgaagcagttggcgttggcacaaaaggtgccggaagccgaatatatcttgcagtgcgactatgcgcagttggcgttggtggagaacttgctgcagcaaaccgcaggtcggatcctacagggcgaatacggcgccgccgtcgtgctgcatctggcgttgccggccaccgaggtcgaactgtttgggaataaattgcgtgatctcagtcgcggtaatttgcaattaacccccatttcgcaataattcctcccaattgaattgctaaggatcgtgctgaaatgcattttcgcgccataacccgtatcgttggtctgctggtcatcctgttctccgggacgatgtttattcccggcctggtggcattgatttaccgcgatggggcggggcgcgcgttcagccaaaccttcttcgtggcgctgaccatcgggctgatgctgtggtggccgaaccgcaaacagaaacacgagctgaagccccgtgaaggcttcctgattgtcgtgttgttctggaccgtgctgggcagcgtgggggcattgccgttcctgttttcggaacggcccaacttgtcgctgaccgacgccttctttgaatccttctcgggattgacgactaccggcgcaacgacgctggtggggttggactcgttgccgaaggccatcctgttctatcgccaaatgctgcaatggatgggcgggatggggatcatcgtgttggcggtggcgatactgccgatacttggcgtcggcggcatgcagctgtatcgagcggaaatgcccgggccgctgaaagataacaagatgcgtccacgcatcgccgaaaccgccaaaaccctgtggctgatctatgtgttgctgaccgtcgcctgtgcgctggcgctctggggggccgggatgtcggtgttcgacgccatcggccacagtttctcgaccatcgccattggcgggttttctacccacgacgccagtatcggttattacgccagtccgactatcaacaccatcatcgccgtgttcctgctgatttccggctgtaactacggcctgcacttcgctttgctaagcggccgtagtctgaaggtgtacgggcgcgatcctgaattccgcatgttcatcttcgttcagttgacgctggtggtggtatgcacgttggtgctctggggacatggcgtctataagagcggtatggaaacgctcaatcaggcgttcttccaggtggtatcgatggcgaccacggccggttttacgaccgacagcatcgccaagtggccgctgttcctgccgatgttgttgctgtgctcggcgttcatcggcggctgcgccggctcgaccggcggtggcctgaaggtgatccgtattctgcttctgtacctgcagggctcgcgcgagttgaagaggctggtgcaccccaacgcggtctataccatcaaactgggcaaccgcgcgctgccggaacgcattctggaagcggtatggggattcttctccgcctatgcgctggtgtttatcgtcagtatgctggcgatcattgccaccggcgttgacgatttttccgcgttcgccgcagtgacggcaacactcaataaccttggccccggcttgggcgtggtggcggataacttcaccacgatgccggcggcggccaagtggatcctggtggtgacgatgctgttcgggcgcctggaagtgtttacattgctggtgctgttcacgccaactttttggcgtgagtgagcctgatataaggagtacgccatgaaggcattgatactttattcgagccgtgacgggcaaacacgtgctatcgcttcttatatagcaagcaagttgcaggacacgctgcgttgtgaggtgattgatctgctgcaggcggaacaggtcgaccttagtcagtaccagcaggtgatgatcggtgcttctatccgttacgggcactttaatccggtactggataaattcgttaagcgccatgccgaacagctgaataggatgccgagcgccttcttcgccgtgaacctgaccgcgcgtaaaccggaaaagcgctcaccgcaaaccaacgcttatacccgcaagttcctgctggcctcgccgtggcagccaaaacagtgcgcggtgtttgccggcgcattgcggtatccgcgctatcgctggttcgaccgcatcatgattcaatttattatgcgtatgacgggcggtgaaacggataccagtaaggaagtggagtacaccgattggcagcaggtcgatcgtttcgcccaggaatttagccagatccagtacgaaaagtgacaaaaacgcgggtttggccagcgttttgccgaaaaaatcctcgcttgaaaagttttttgcaattaggggttgcggcctgccgagaactccctataatgcgcctccactgaccgggaacaacgactgacaagccgccgggtcagcgagaagaaagcgaaataaacgcttgactctccgggcgaaaagcgtagtatacgcagcccgcgccgatgaagtttctcggcactgctctttaacaatttatcagacaatctgtgtgggcactccacaagacgatatccagcatcttcggatgcaaaaaaatatcaagtcttgaagagtgactaactgaagtaaaattcatgcagtaaatctttgagcatcgcttctcgagtggaagcaaatcaagcttttaattgaagagtttgatcatggctcagattgaacgctggcggcaggcttaacacatgcaagtcgagcggtagcacaggggagcttgctccctgggtgacgagcggcggacgggtgagtaatgtctgggaaactgcctgatggagggggataactactggaaacggtagctaataccgcataacgtcgcaagaccaaagagggggaccttcgggcctcttgccatcagatgtgcccagatgggattagctagtaggtggggtaatggctcacctaggcgacgatccctagctggtctgagaggatgaccagccacactggaactgagacacggtccagactcctacgggaggcagcagtggggaatattgcacaatgggcgcaagcctgatgcagccatgccgcgtgtgtgaagaaggccttcgggttgtaaagcactttcagcgaggaggaaggtggtgaacttaatacgttcatcaattgacgttactcgcagaagaagcaccggctaactccgtgccagcagccgcggtaatacggagggtgcaagcgttaatcggaattactgggcgtaaagcgcacgcaggcggtttgttaagtcagatgtgaaatccccgggctcaacctgggaactgcatttgaaactggcaagctagagtctcgtagaggggggtagaattccaggtgtagcggtgaaatgcgtagagatctggaggaataccggtggcgaaggcggccccctggacgaagactgacgctcaggtgcgaaagcgtggggagcaaacaggattagataccctggtagtccacgctgtaaacgatgtcgatttggaggttgtgcccttgaggcgtggcttccggagctaacgcgttaaatcgaccgcctggggagtacggccgcaaggttaaaactcaaatgaattgacgggggcccgcacaagcggtggagcatgtggtttaattcgatgcaacgcgaagaaccttacctactcttgacatccagagaactttccagagatggattggtgccttcgggaactctgagacaggtgctgcatggctgtcgtcagctcgtgttgtgaaatgttgggttaagtcccgcaacgagcgcaacccttatcctttgttgccagcggttcggccgggaactcaaaggagactgccagtgataaactggaggaaggtggggatgacgtcaagtcatcatggcccttacgagtagggctacacacgtgctacaatggcgtatacaaagagaagcgacctcgcgagagcaagcggacctcataaagtacgtcgtagtccggattggagtctgcaactcgactccatgaagtcggaatcgctagtaatcgtagatcagaatgctacggtgaatacgttcccgggccttgtacacaccgcccgtcacaccatgggagtgggttgcaaaagaagtaggtagcttaaccttcgggagggcgcttaccactttgtgattcatgactggggtgaagtcgtaacaaggtaaccgtaggggaacctgcggttggatcacctccttacctaaagatattgcttcgcgtggcgtgctcacacagattgtctgatgaaaaagtaacgagcaaaagcgtcataaaagtacggtgtcgtgtccccttcgtctagaggcctaggacaccgccctttcacggcggtaacaggggttcgaatcccctaggggacgccaagcttccgacccacccggtgaaagcggcggtcttcagtatctgacgatacaccatatcttaaagatgacttccgagtcatgtttaagatattgctctttaacaatctggaacaagctgaaaattgaaacatgacggctgaaatttgtccctccgtagatgtattgggatgaagagtaacctgtcatagagtctctcaaatgtttgcagcgcgaacgatggaaacatcttcgggttgtgaggttaagtgactaagcgtacacggtggatgcctaggcagtcagaggcgatgaagggcgtgctaatctgcgaaaagcgtcggtaaggtgatatgaaccgttataaccggcgatacccgaatggggaaacccagtgtgtttcgacacactatcatgtcatgaatacatagtggcatgaggcgaaccgggggaactgaaacatctaagtaccccgaggaaaagaaatcaaccgagattcccccagtagcggcgagcgaacggggaggagcccagaacctgaatcggcttgtgtgttagtggaagcgtctggaaagtcgcgcagtaaagggtgatagccccgtacactaaaatgcacaggtcgtgagttcgatgagtagggcgggacacgtgacatcctgtctgaatatggggggaccatcctccaaggctaaatactcctgactgaccgatagtgaaccagtaccgtgagggaaaggcgaaaagaaccccggcgaggggagtgaaatagaacctgaaaccgtgtacgtacaagcagtgggagcaccttcgtggtgtgactgcgtaccttttgtataatgggtcagcgacttatattttgtagcaaggttaaccgtataggggagccgtagggaaaccgagtcttaactgggcgattagttgcaaggtatagacccgaaacccggtgatctagccatgggcaggttgaaggttgggtaacactaactggaggaccgaaccgactaatgttgaaaaattagcggatgacttgtggctgggggtgaaaggccaatcaaaccgggagatagctggttctccccgaaagctatttaggtagcgcctcgtgaactcatcttcgggggtagagcactgtttcggctagggggccatcccggcttaccaaaccgatgcaaactccgaataccgaagaatgttatcacgggagacacacggcgggtgctaacgtccgtcgtgaagagggaaacaacccagaccgccagctaaggtcccaaagtcatggttaagtgggaaacgatgtgggaaggcatagacagccaggatgttggcttagaagcagccatcatttaaagaaagcgtaatagctcactggtcgagtcggcctgcgcggaagatgtaacggggctaaaccatgcaccgaagctgcggcagcgacgcttaggcgttgttgggtaggggagcgttctgtaagccgttgaaggtggcctgtgagggttgctggaggtatcagaagtgcgaatgctgacataagtaacgataaagcgggtgaaaagcccgctcgccggaagaccaagggttcctgtccaacgttaatcggggcagggtgagtcgacccctaaggcgaggctgaaaagcgtagtcgatgggaaacaggttaatattcctgtacttggtgttactgcgaaggggggacggagaaggctaggctggccgggcgacggttgtcccggtttaagcgtgtagggggtgtgacctggtaaatccggttgcatattaaccctgaggcgtgatgacgatgcactacggtgcagaagtagttgatgccctgcttccaggaaaatcctctaagctccaggtaacattaaatcgtaccccaaaccgacacaggtggtcaggtagagaataccaaggcgcttgagagaactcgggtgaaggaactaggcaaaatggtgccgtaacttcgggagaaggcacgctggcatgtaggtgaagtccctcgcggatggagctgaagccagtcgaagataccagctggctgcaactgtttaataaaaacacagcactgtgcaaacacgaaagtggacgtatacggtgtgacgcctgcccggtgctggaaggttaattgatggggtcagccgcaaggcgaagctcttgatcgaagccccagtaaacggcggccgtaactataacggtcctaaggtagcgaaattccttgtcgggtaagttccgacctgcacgaatggcgtaatgatggccaggctgtctccacccgagactcagtgaaattgaactcgctgtgaagatgcagtgtacccgcggcaagacggaaagaccccgtgaacctttactatagcttgacactgaacattgagccttgatgtgtaggataggtgggaggctttgaagcgtggacgccagtctgcgtggagccatccttgaaataccaccctttaatgtttgatgttctaactcggccccgtgatccggggtgaggacagtgtctggtgggtagtttgactggggcggtctcctcccaaagagtaacggaggagcacgaaggttagctaatcacggtcggacatcgtgaggttagtgcaaaggcataagctagcttgactgcgagagtgacggctcgagcaggtacgaaagtaggtcttagtgatccggtggttctgaatggaagggccatcgctcaacggataaaaggtactccggggataacaggctgataccgcccaagagttcatatcgacggcggtgtttggcacctcgatgtcggctcatcacatcctggggctgaagtaggtcccaagggtatggctgttcgccatttaaagtggtacgcgagctgggtttagaacgtcgtgagacagttcggtccctatctgccgtgggcgttggaagattgagaggggttgctcctagtacgagaggaccggagtgaacgcaccactggtgttcgggttgtcatgccaatggcattgcccggtagctaagtgcggaaaagataagcgctgaaagcatctaagcgcgaaacttgcctcaagatgagtcttccctgggcctttaaggcccctgaaggaacgtttaagactaagacgttgataggctgggtgtgtaagtgcagcgatgcattgagctaaccagtactaatgatccgtgaggcttaaccttacaacaccgaaggtgtttttagagagacaaaatcgtcgggaacgattttgaacaacgcggagcgttggccccgaaggggtgagtatcaggatgatacgaataattttcagcgaagttccgagattggttctgatggcgacacgagagtgaagcggttggaatgaaacgaatttgcctggcggcaatagcgcggtggtcccacctgaccccatgccgaactcagaagtgaaacgccgtagcgccgatggtagtgtggggtctccccatgcgagagtaggacactgccaggcatcaaacaaagccgaaagccctgaactgacgttcagggctttttgctgtgcgtaaaataaatatcctgacagtatctattactttgaaaaatgcctttttgggcatatgtagcttatccttataaggaagcataatgtttctttgctagggaaatagccagctaaatatataattgatagttccagattattatttaaataataaaaatatctatctatgaacagactgatgagaattatccggttatatcaaagataagtcttaattcttcagtgtattagtcgataaatttcacgttaattaaaacaaatattagccagacgcctcgaatcgagtagactaggcggaagattatttccgtatgggtactgaacgttatgtctactgaaagcgcgtctttaaaaaaccacaatacgtttgcgctcccggtcaacgcagcgcacctgatcatggccgatagaattgagctgatgctcaaggtgtggcaacaaacgcgcaagcgtcaggagccgttgctgattctcggtgaaggtagcaacgtgctgttcctggaggatttttctggcacagtaatggtcaatcagttgaagggtattgatgttcgggaagataacgatgcctggtatctccacgtcagctccggtgaaaattggcatgacctggtgcaatatacgctgcaggccgggatctgcggtctggaaaacctggcgttgattcctggattggccggttccgcccctatccagaacatcggcgcctacggcgtcgaattgaaagacgtctgcgagtatgtcgatctgctggacttctctaccggcgctatcgatcgtattccggctgccgagtgtggttttggctaccgggaaagtattttcaaacaccgtttccagaccggacatgtcattgttgggctgggtctgcgtctcaacaaacagtggcaacccaaattgagctacggcgatctggccaagctggatcctgccacggtgacgccacttcaggtatttgaatccgtatgcgccatgcgccgcagcaagctgcccgatccgcgtgaaaccggcaatgccggcagcttcttcaagaatccgctggtgaacgcagagaaagccgcagaactcatcgctcaatatcccggtatgccgcattatccacagcaggatggccaggtgaagctggccgccggatggcttatcgatcaatgcgaactgaaaggatatcgtatcggtggcgctgcggtacaccgccaacaagcgctggtgctggtgaacatcgccaacgcccacagtcaggatgtggtggcgttggcgcgccacgtacgcaagacggtggctgataaattcggcgtgtggctggaacctgaggtgcgttttattggcgcgaccggtgaactgaatgccgtggcggtgctgtcatgaaagataccaaggttccgttaaaactgatcgcgctgctggctgacggcgaattccattccggtgaacacctcggtgagtcactgggcatgagtcgcgcggcgatcaataagcatattcagaccattcgcgaatggggactggatgtctttaccgtgcccggaaaaggctatagcctgcctggcgccatccagctgttggaagccaagcgaatcctcagcctgctggaagacaagcgtgtaagcgtgttgccggtggtcgattccaccaaccaatacttgctggaccgcatcgacgaattgcactctggtgatgcctgcgtcgctgaataccaacaggctggacgagggcgccgcgggcggcagtggatctcgccattcggtgccaatttatatctgtcgatgttctggcgactggagcaggggccggcagcggctatggggcttagcctggtgatcgggatggtgatggcggaggtcttgcagcgcctcggtgcggctgatgtgcgcgtgaagtggcctaacgatctttatctgaacgatcgtaaattagcggggatcctggtcgaactgacgggaaaaaccggcgatgcggctcaactggtcatcggcgccggcatcaacctggcgatgcgtgataccaatgccagcgccattactcagggatggattaacctacaggaagcgggaattcagatcgatcgcaatgaactggctgcaaccttgcttaatgaactgcgtcagtcattgaaacagtttgagatagacggactcgcgccctttatcggtcgctggcgtaccctggataactttatcgacaggccggtcaagctgctgattggcgagcggcagattgtgggtatcgcccgaggaatcgattcacagggcgcactgctgctggaacaggacggggagatcaagcccttcatcggtggcgagatatcgctgcgcagcgcggaatagtgagaaaagacaaggggacagtaacgtcccctgaatcgatcggtaggcttactttcttaaacgcacgctttcaacggcgtggttagcgcttttggtcattatcaggctggcgcgttcacgggtgggcagtatattctgctgcaaattcaatccgttaatttcattccataattgcgtggcgatattaatcgcctccggttccggcaattttgaataattatggaaataagaatcgggattggaaaatgcgccctgacggaatttcagaaaacgattgatataccagctttgtaatagcgtttccggcgcatcgacatatatagagaagtcgacaaagtcggaaacgaatacgcgatgcggatcgtgaggataatccataccgctttgcaacacgttaagcccttccaggatcagaatatccggttgctcgatgactttattaccttcgggtacaacgtcatagatcaaatgggaataaaccggggcggtgacgcgtttggcgccggatttcacttccgacacgaatttcaccaggctatgcatatcgtaagactgcgggaagccttttttcttcatcaggccgcgttcgttcagcaccttattagggtgcaagaagccgtcggtcgtgatcaactcaacgctgcggtgttctggccaacggctcaacaacgcctgcaacagacgtgcggttgtgctcttacctacggctacgctgccggcgatgccgatgacatagggaatcttttgcccgtcggtgccgaggaattgctcgagcaccgcctgcctacgcaggttggaactgatatagaagttcaacagccgtgacagcggcagataaatctgcgcaacttcttccaacgagagatcttcgttaatccctttcagtttaacgatctcttcttccgacaacgtcagcggcaccgaatctcgcaacgcagcccattgggtacgatcgaactgtaggtaaggcgttgctaaagattgatctctttttatcataagccaaattctgcctgttaacgcaggttgggaaaggcgccggacgccaactccagagaataaacaagctgcatattatagacagcttcgtttttggcgtagacttttttcgcaaaagttgtcgataggcagcagtttatgtcaattgtgcgaagcggcgcgcagttgataaagcggggttgcaaggcggtatcatcagagccggataccgcctgaagactaactggcgatggcgcgcgaaggctgatttacggtgaacagacgtttgtaataaatgacggtcggatggtaatgcccgtcgggacccgctgcataatccggcagctcacccaaacagcgataacccaggctgcgataaagcgcttctgccgccgaaccggcctgcgtatccagatacaatagcccgcgttgctgctgcagtgccgcgtactccagcgtcttcatcagagcctgacctacgccgttgcggcgagcacggctatgcaccaacagcttcaccacctccgcacgattacggccgttcggcttctggcaaagttcgagttgcacggtgccaacgacgccgcgatcgtcacgggcaatccacagcagcagctcacctttggccagggccggtcgcagactgtggaagtagctctcggcgtcttcgtgaggaattaaggtgtcgtaaccgacagaagcgccgtgcgtgacggcatcggtcaacaggcgggccaattcatcgcggtaaattgggagcgtagcggcgttgataggcactattttcatcggtcattcctcctgggatgggggtaatgaagagaagcaataactgagccacagcggcgaaaggcatagcaacggcaaaagggcgagggatcagtgtagcccacgccgcagtccggggcaggtatcccctttttggtgcatcgatcccgctcacagtttaccagcgcgggttaagtgttttgagaagcccgacacggagaaagcggcgctcaaggcttgcaaaaagtggataaaattgtagagaatgattgccgcgagtgatgaatgtttgcacgccgcaggctgcaaattgcatgacagtatgcaaaattgactgatttatgagcgaaagtgcgcgtaaagcaatttttttgttgcataggtcgcccgctctacctagaatgcgctgcacttgatgccggcttagctcagtaggtagagcaactgacttgtaatcagtaggtcaccagttcgattccggtagccggcaccattcaagtcacaagtagttaaaatctggtggggttcccgagcggccaaagggagcagactgtaaatctgccgtcacagacttcgaaggttcgaatccttcccccaccaccaaatcttgccttcggcgattaactgagatgcgataaataccgcaacggttgatggcgggaggagagggcgaaagccttcggcaaggttcgagctgtgcagcgcaaggcgcagccggcccgaaggatgcgagccgagtgatgaacaatcctgctccatcccaaaattctacagaaaaatcaggtagccgagttccaggatgcgggcatcgtataatggctattacctcagccttccaagctgatgatgtgggttcgattcccactgcccgctccaagatgtgctgatatagctcagttggtagagcgcacccttggtaagggtgaggtcggcagttcgaatctgcctatcagcaccacttcttaatttctcgccccctgattttctttctgttctggattcaacgagcaaatgcttggttgatgtggtgataccaccgatttatccgtgtcttagagggacaatcgatgtctaaagaaaagtttgaacgtacaaaaccgcacgttaacgtcggtactatcggccacgttgaccacggtaaaactaccctgactgcagcgatcactaccgtactggctaaaacctacggcggttctgcacgtgctttcgaccagatcgataacgcgccagaagaaaaagctcgtggtatcaccatcaacacctcccacgttgagtatgacaccccgactcgtcactacgcgcacgttgactgcccagggcacgccgactacgtgaaaaacatgatcaccggtgctgctcagatggacggcgcgatcctggtagtagctgcgactgacggcccaatgcctcagactcgtgagcacatcctgctgggtcgtcaggttggcgttcctttcatcatcgtattcatgaacaaatgcgacatggttgatgatgaagagctgctggaactggtagaaatggaagttcgcgaactgctgtccgcttacgacttcccaggcgacgacctgccagtaatccgcggttccgcgctgaaagcgctggaaggcgaagctgagtgggaagcgaaaatcatcgaactggccgaagccctggacagctacatcccagagccagagcgtgcaatcgacaagccgttcctgctgccaatcgaagacgtattctccatctccggtcgtggtaccgttgttaccggtcgtgttgagcgcggtatcatcaaagttggcgaagaagttgaaatcgttggtatcaaagacaccgttaagtctacctgtactggcgttgaaatgttccgcaaactgctggacgaaggccgtgctggtgagaacgtaggtgttctgctgcgtggtatcaaacgtgaagaaatcgaacgtggtcaggtactggctaagccaggctccatcaagccgcacacccagttcgaatctgaagtgtacatcctgagcaaagatgaaggtggtcgtcacacgccattcttcaaaggctaccgtccacagttctacttccgtactactgacgtgaccggtaccatcgaactgccagaaggcgtagagatggtaatgccaggcgacaacgtgaacatggttgtaaccctgattcacccaatcgcgatggatgacggtctgcgtttcgcaatccgtgaaggcggccgtactgtaggcgctggtgttgttgctaaagttatcgcttaatcgctgataaagtttgacgcgacacgcggtaaaagggcatcatttgatgccctttttctacgctgtgaactagaacctatctcatcagcgattttgcagtcataatcattggtgagatgggctcttaaaccgtattgactgaatacgtcatggcgtaaaacaccgggatatcgctcgcgcggtatccgatcggtttggtttgcctcgcaatgcgaggcaaagttgtttgttctgaatcatcattgtgacaggttggtttatgagtgcgaataccgaggctcaagggagcggacgcggcctggaagcggcaaagtggctgatcgtcgccgttctgttggttgtggctattgtcggtaactattactaccgtgatttaagcctgccattgcgcgcgctggcagttgtgctgatcatcgccgttgcaggtgcagtggctctgatgaccaccaaaggcaaagccaccgttgcgtttgcccgtgaagcgcgtaccgaagtacgtaaagtgatttggccaactcgtcaggaaacgctacacaccacgttgatcgttgccgcggtaaccgccgtgatgtcactgattctgtgggggctggatggtattctggtccgtctggtgtcgtttattactggcctgaggttctaaaatgtctgaagctccaaaaaaacgttggtacgtcgttcaggcgttttccggttttgaaggtcgcgtagcgcaatcgctgcgtgaacacatcaaactgcacgatatggaagagctgttcggcgaagtgatggtgcctacggaagaagtggttgaaatccgtggtggccagcgtcgcaagagcgagcgtaaattcttccctggctatgtgctggtgcagatggtgatgaatgacgccagctggcacctggtgcgcagcgtaccgcgtgtcatggggttcatcggcggtacgtctgaccgtcctgcgccgatcagcgataaagaagttgatgcgatcatgaaccgcctgcagcaggtcggtgacaaaccgcgtccgaaaacgctgttcgaaccgggcgagctggtgcgcgtcaacgacggcccgtttgccgatttcaacggcgtggtcgaagaagtcgattacgagaagagccgcctgaaagtttccgtttccatcttcggccgtgcaacgccggtggaactggacttcagccaggttgaaaaaggctgatcgaataatcagcaataagcggtccgttgccgcttgtcaaaggcgcgaaattgaactacaatttcgcgccttttgtttttagatgccttgcctgatgtctgtccggcgaggttaaacacggggagcctctcacgaggcgatactacccaaaccgaggaaatttaaatggctaagaaagtacaagcctacgttaagctgcaagttgcagctggtatggctaacccgagcccaccagtgggtccagctctgggtcagcagggcgttaacatcatggaattctgtaaggcattcaacgctaaaactgacagcgttgagaaaggtctgccgattccggttgttatcaccgtttattctgatcgctccttcactttcgttaccaaaaccccgccagcagcagttctgctgaaaaaagcggctggtatcaagtctggttccggtaagccgaacaaagacaaagtaggtaaagtgacccgtgctcaggtacgtgaaatcgcagaaaccaaagctgcggacatgactggttctgacgttgaagcgatgactcgctccatcgaaggtaccgctcgttccatgggcctggtagtggaggattaagagatggctaagctgaccaagcgcatgcgcgtgatccgtgacaaagttgatgctactaaacagtatgacatcactgaagctgttgctctgctgaaagagctggccaccgctaaattcgtagaaagcgttgacgttgccgttaacctcggtatcgacgctcgtaaatctgaccaaaacgttcgtggcgctaccgttctgccacacggcaccggtcgttccgttcgcgttgccgtatttacccaaggcgctaacgctgaagcagcgaaagctgccggcgcagagctggtaggtatggacgatctggctgagcagatcaagaaaggcgaaatgaacttcgacgttgttattgcttccccggatgcaatgcgcgttgtaggtcaactgggccagatcctgggtccacgcggcctgatgccaaacccgaaagtgggtaccgttactccgaacgttgctgaagcagtgaaaaacgctaaagcaggtcaggttcgctaccgtaacgacaaaaacggcatcatccataccactatcggtaaggttgatttcgacgcagacaaactgaaagaaaacctggaagccctgctggttgcgctgaaaaaagcaaaaccttctcaggcgaaaggcatgtacatcaagaaagttagcctctccaccaccatgggtgctggcgttgctatcgatcagagcggtctgtctgccgcagcgaactaatcgcacttgcgattatcgctttgacttggggccgagatttgtctagaatcttatgccccaaggttttgctattggctatgccgtaggcaaaacaaagatttttcggttggagcctggcctatccaggcctccgtccaagaccgcaggtgtatcgcgagatacttaatccttcctgcgtagacggtgacagagcctaagaaaatttttcttttttataaaagaatgtctttgctggattctgctcaccgtgttaagccgctcggcgtggcgttttacaaagcgccgagtgaagtgagttccgggggattttccccggctaatccaggagcaaaaagctaatggcattaaatcttcaagacaaacaagcgattgttgctgaagtcagcgaagtagccaaaggcgcgctgtctgcggttgttgcggattcccgcggcgttaccgtagataaaatgactgaactgcgtaaagcaggtcgtgaagctggcgtttacatgcgtgttgttcgcaacaccctgatgcgtcgcgtagttgaaggcactccattcgaatgcctgaaagacacgtttgtcggtccaaccttgattgcattctctcacgaacacccgggcgctgctgctcgtctgttcaaagagttcgcgaaagcgaatgcaaaattcgaggttaaagctgcggcctttgaaggtgagctgatcccagcggcgcaaatcgaccgcctggcgacgctgccaacttacgaagaagcgatcgcacgcctgatggcaaccatgaaagaagccgctgccggcaaactggttcgcactctggctgcagtacgcgatcagaaagaagcggcgtaagccactctttcttagcctttgctaacgtatttaaactatttctgaattttaggaacaattgttatgtctatcactaaagaccaaatcctggaagcagttgccgctatgtccgtaatggacgttgttgaactggtttccgctatggaagaaaaattcggcgtttctgctgctgctgctgtagctgtagctgctggcccagctgaagctgctgaagagaaaactgaattcgacgttatcctgaaagctgcaggcgctaacaaagttgctgttatcaaagcagtacgtggcgctaccggcctgggtctgaaagaagctaaagacctggttgaatctgctccagccgctctgaaagaaggcgtgagcaaagatgacgcagaagctctgaaaaaatctctggaagaagctggcgcagaagttgaagttaaataagccaacctttccggttgcagcctagtcttttaggctgatggctggtgactttttagtcaccagcctttttgcgctgtagggcgccagtagcgtttcacactgtttggctgctggtttcgcctcccaatgtttgtttctattgacgacttaatataccgcggtctttgcactaccaggagttctgggggaaggcgcgatgaaatggtttaagcgtgatagcaagagacattgcgggaagtgttcccgctttccggtcgacaaaacggtgttgcatgaactgtccctaatcggacggacagattgggtcactgatcagcgagctgaggaaccctatggtttactcctataccgagaaaaaacgtattcgtaaggattttggtaaacgtccacaagtgctggacataccatatctcctttctatccagcttgactcgttccagaagtttatcgagcaagatccagaagggcagtacggccttgaagccgcattccgttctgttttccctatccagagctacagtggcaattcggagctgcaatacgttagctaccgtcttggtgagccggtcttcgacgtcaaagagtgccagatccgtggtgtgacgttctctgcaccgctgcgcgtaaaactgcgcctggttatctatgagcgcgaagcgcctgaaggtacggtcaaagacatcaaggaacaagaagtctacatgggcgaaattccgctcatgaccgaaaacggcacctttgtgatcaacggtactgagagggttatcgtatctcagttgcaccgtagtcctggcgtattcttcgacagcgataagggtaaaacccattcctcgggtaaagtgctgtacaacgcacgtatcatcccttaccgcggttcatggttggacttcgagttcgatccgaaagacaacctgttcgtgcgtattgaccgtcgccgcaaactgcctgcgaccatcattctgcgcgcgctgaactacaccactgaacagatcctcgacctgttctttgacaagatcgtcttcgaaatccgcgacaacaagctgcagatggagctggtgcctgagcgcctgcgtggtgagaccgcttcgttcgatatcgaagccaacggcaagatctacgtagagaaaggccgtcgtatcaccgcccgtcatatccgtcagctggaaaaagacgacattcagagcattgaagtaccggtagagtacatcgcgggcaaagtggtcgcgaaagactatatcgataccaataccggcgaactgatctgcgcagccaacatggagctgtcgctggatctgctggccaagctgagccagtccggccacaagcgcatcgaaacgctgttcaccaacgatctggatcacggcgcgtatatctctgaaacgctgcgtgtcgatccgaccaacgatcgtctgagctcgctggtagaaatctaccgcatgatgcgtcctggtgagccgccaacgcgcgaagctgccgaaagcctgttcgagaacctgttcttctccgaagaccgctacgatctgtccgcagtcggccgtatgaagttcaaccgttctctgctgcgcgacgagatcgaaggttcgggcatcctgagcaaagacgacatcatcgaagtgatgaagaagctcatcgatatccgtaacggcaagggcgaagtggacgatatcgaccacttgggcaaccgtcgtatccgctccgtcggcgaaatggccgagaaccagttccgcgtaggtctggtgcgtgttgagcgtgcggtgaaagagcgtctgtctctgggcgatctggataccctgatgcctcaggacatgatcaacgccaaaccgatttcggcggcggtgaaagagttcttcggctccagccagctgtcccagttcatggaccagaacaacccgttgtccgagatcacgcacaagcgtcgtatctctgcactgggcccgggcggtctgacccgtgagcgcgccggctttgaagttcgagacgtacacccgacccactacggccgcgtgtgcccaatcgaaacgccggaaggtccaaacatcggtctgatcaactccctgtccgtgtacgcacagactaacgagtatggcttcctggaaaccccgtaccgccgcgtgcgcgacggcgtggtgaccgatgaaatcaactacctgtctgctattgaagaaggcaacttcgttatcgcccaggcgaactccaacctggatgaagaaggccgcttcgtagaagacctggtcacctgtcgtagcaaaggcgaatcaagcctgttcagccgcgaccaggttgactacatggacgtatccacccaacaggttgtttccgttggtgcctcactgattccattcctggaacacgatgacgccaaccgtgcattgatgggtgcgaacatgcaacgtcaggccgtaccaaccctgcgcgctgacaagccgctggtcggtaccggtatggaacgcgctgtagcggttgactccggcgtaaccgccgttgccaaacgcggcggtgtgatccagtacgtggatgcttcccgtatcgttatcaaagttaacgaagacgagatgtacccgggcgaagcaggtatcgatatttacaacctgaccaagtacacccgttctaaccagaacacctgcatcaaccagatgccgtgtgtgaatctgggtgagccaatcgagcgcggcgacgtgctggcggatggcccatcgacagacctgggcgaactggcgctgggccagaacatgcgcgtagcgttcatgccttggaacggctacaacttcgaagactccatcttggtctccgagcgcgtggtgcaggaagatcgcttcaccaccatccacatccaggaactggcgtgcgtgtctcgcgacaccaagctggggcctgaagagatcaccgccgacatccctaacgtgggtgaagctgcgctctccaagctggatgaatccggtatcgtgtatatcggtgctgaagtgaccggtggcgacattctggtcggtaaggtaacgcctaaaggcgaaacccagctgacgccggaagagaaactgctgcgtgcgatcttcggtgagaaggcgtctgacgttaaagactcttctctgcgtgtgccgaacggcgtttccggtacggttatcgacgtgcaggtcttcacccgcgatggcgtggaaaaagacaagcgcgcgttggaaatcgaagagatgcagctgaagcaggcgaagaaagacctgactgaagaactgcagatcctggaagctggtctgttcgcacgtatccacgcggtgctggttgccggtggcatcgaagccgacaagctgagcaagctgccgcgcgatcgctggctggaactgggcctgaccgacgaagagaagcaaaaccagctggagcagctggctgagcagtacgacgaactgaaatccgacttcgagaagaagctggaagccaagcgtcgtaagatcactcagggcgacgatctggcgccgggcgtgctgaaaatcgtcaaggtttatctggccgttaaacgtcagatccaaccgggtgacaagatggcgggccgccacgggaacaagggtgttatctccaagatcaacccgatcgaagatatgccttacgatgaaaacggcacgccggttgacatcgtactgaacccgctgggcgtaccatcacgtatgaacatcggtcagatcctggaaacccacctgggtatggctgcgaaaggcatcggtgagaagatcaaccagatgctgaagcagcagcaggaagtggccaagctgcgtgagttcatccagaaggcctacgatctgggcgacgacgtttgccagaaagttgacctgaacaccttcagcgacgacgaagtgctgcgtctggcagagaacctgaaaaaaggtatgccgatcgcaacgccggtgtttgacggtgcgaaagagactgaaatcaagaagctgctggaaatgggtggtatcccgacctccggtcagatcacgctgttcgatggccgtaccggtgagcaattcgagcgccaggttactgttggctatatgtacatgctgaaactgaaccacttggttgacgataaaatgcacgcccgttcaaccggttcttacagcttggttactcagcaacctctgggtggtaaagcgcagttcggtggtcaacgcttcggtgagatggaagtgtgggcactggaagcatacggcgcggcttataccctgcaggaaatgctcaccgttaagtcggatgacgttaacggccgtaccaagatgtacaaaaacatcgtggatggcgaccaccggatggagccaggcatgccggaatccttcaacgtactgttgaaagaaatccgctcgctcggcatcaacatcgaactggaagacgagtaatcgtcatgccggctcaggctccccgcctaagggagcctgagggtggttgttcaggtcacacgggtacctactgcggttgtgggtacccaacaggtttaactccgacaggagccaatccgtgaaagacttattgaagtttctgaaagcgcaaactaagaccgaagagtttgatgcgatcaagattgctctggcctcgccagacatgatccgttcgtggtcgttcggtgaagttaagaagccggaaaccattaactaccgtacgttcaaacctgagcgtgacggccttttctgcgcccgtatcttcgggccggtaaaagattacgagtgcctgtgcggtaagtacaagcgcttgaaacaccgcggcgtgatctgtgagaagtgcggcgttgaagtgacccagactaaagtgcgccgtgagcgcatgggccacatcgagctggcttccccgactgcgcacatctggttcctgaaatcgctgccatcccgcatcggtttgctgctggatatgccgctgcgtgacatcgaacgcgtactgtacttcgaatcctatgtggtggtcgaaggcggtatgaccaacctcgagcgtcgtcagatcctgactgaagagcagtatctggacgcgctggaagagttcggtgacgaattcgacgccaagatgggtgcggaagccattcaggccctgttgaaaaacatggatctggaagccgagtgcgagcagctgcgtgaagagctgaacgaaaccaactccgaaaccaagcgcaagaagctgaccaagcgtatcaagctgctggaagcgttcgtacagtccggtaacaagccggagtggatgatcctgaccgtgctgccggtactgccgccggatttgcgtccgctggttccgctggatggcggccgtttcgcgacgtcggatctgaacgatctgtatcgccgcgtgatcaaccgtaacaaccgtctgaaacgcctgctggatctggctgcgcctgacatcatcgtgcgcaacgaaaagcgtatgctgcaagaagcggtagacgccctgctggataacggccgtcgcggtcgtgccatcaccggttccaacaaacgtcctctgaaatctttggccgacatgatcaaaggtaagcagggtcgtttccgtcagaacctgctcggtaaacgcgttgactactccggccgttccgtaatcaccgtaggtccatacctgcgtctgcatcagtgcggtctgcctaaaaagatggcgctggagctgttcaaaccgttcatctacggcaagttggagctgcgtggcctggccaccaccatcaaagccgccaagaaaatggttgagcgtgaagaagccgtcgtttgggatatcctggacgaagtgatccgcgaacacccggtactgctgaaccgtgcaccaaccctgcaccgtttgggtatccaggcgtttgaaccggttctgatcgaaggtaaagcgatccagctgcacccgctggtttgtgcggcctataacgccgacttcgatggtgaccagatggccgttcacgtaccgctgacgctggaagcccagctggaagcgcgtgcgctgatgatgtccaccaacaacatcctgtccccagcgaacggcgagccaatcatcgttccttctcaggacgttgtactgggtctgtactacatgacccgcgactgtgttaacgccaagggcgaaggcatggtgctgaacggttccaaagaagctgagcgcgtataccgcgccggcctggcgtcgctgcatgcgcgcgttaaagtgcgtatcaccgaagacgtcaagaacgccgaaggcgagtggacctctcagaccagcatcatcgacaccaccatcggccgcgccatcctgtggatgatcgtaccgaaaggtctgccgtacgcgatcgttaaccagcctttgggcaagaaagcgatctccaagatgctgaacacctgttaccgcatcctgggcctgaagccgaccgtaatctttgctgaccagatcatgtacaccggttttgcttacgcagcccgttccggcgcttccgtaggtatcgacgacatggttatcccggccaagaaagcggagatcatcgaagaagcggaaaccgaagttgccgagatccaggagcagttccagtctggtctggttaccgccggcgaacgctacaacaaagtgatcgatatctgggctgccgcgaacgaacgcgttgcgaaagcgatgatggaaaacctgtcggtagaagacgtggttaaccgtgacggcgaagtggaacagcaagtttccttcaacagcatctttatgatggccgactccggtgcgcgtggttccgccgctcagattcgtcagctggccggtatgcgtggtctgatggcgaagccggacggctccatcatcgaaacgccaatcaccgcgaacttccgtgaaggtctgaacgtactccagtacttcatctccacccacggtgctcgtaaaggtctggcggataccgcactgaaaaccgcgaactccggttatctgacccgtcgtctggttgacgtggcgcaggacctggtggtgaccgaagacgactgtggcacccacgacggcatcctgatgactccggttatcgaaggtggcgacgtgaaagagccgctgcgtgaacgcgttctgggccgtgtgacggcagaagacgtcctcaagccgggtacggcggacattctggtgccacgcaacaccctgctgaacgagaaggcgtgtgacctgttggaagagaactctgtcgacagcgttaaagtccgttccgtggtgagctgtgaaaccgacttcggtgtgtgtgctaactgctatggtcgcgacctggcacgtggccacatcatcaacaaaggcgaagccatcggcgttatcgcggcacagtccatcggtgagccgggtacacagctgacgatgcgtacgttccacatcggtggtgcggcatctcgtgcggctgctgaatccagcattcaggtgaaaaacaagggtagcatcaagctgagcaacgcgaagttcgttatgaacgccgcaggcaagctggtgatcacctcgcgtaacaccgaactgaaactgatcgacgaattcggccgtaccaaagaaagctacaaggtgccttacggcgccgtgatgggcaaaggcgacggtgaagaagttaacggcggcgaaaccgtcgctaactgggatccgcacaccatgccggtcatcagtgaagtcagcggcttcattcgcttcgccgacatggtcgacggccagacgattactcgtcagaccgacgaactgaccggtttgtcttctctggttgttctggacagcgcagagcgtaccggtagcggtaaagacctgcgtccggcactgaaaatcgttgacgctcagggcgaagacgtattgatcccaggtactgatatgcctgctcaatacttcctgccgggcaaagcgatcgttcagctggaagacggcattcagatcggtgcgggtgataccctggcgcgtattcctcaggaatccggcggtaccaaggatattaccggtggtctgccgcgcgttgccgacctgttcgaagcgcgtcgtccgaaagagccggcaatcctggctgaaatcagcgggattatctcgttcggtaaagagaccaaaggcaaacgtcgcctggtgatctctccgctggacggcagcgacgcttacgaagagatgattccgaaatggcgtcagctcaacgtgttcgaaggcgaagtggtggaacgtggcgacgtcgtttccgacggcccagagtctccgcacgacattctgcgtctgcgtggcgtgcatgcggttacccgctacatcaccaacgaagtgcaggaagtttaccgtctgcaaggcgttaagattaacgataagcacatcgaagttatcgttcgtcagatgctgcgtaaaggcactatcgttagcgctggtggctccgagttcctggaaggcgagcaggctgaagtgtctcgcgtcaagattgccaaccgtcagctggaagctgaaggtaaaatcgcggcaaccttctcgcgcgatctgctgggtatcaccaaggcatccttggcgaccgagtccttcatctccgccgcatcgttccaggaaacgacgcgcgttctgaccgaagctgccgtagccggcaagcgtgatgaactgcgtggcctgaaagagaacgtcatcgtgggccgtctgatcccagccggtaccggttacgcttatcatcaggatcgcatgcgtcgccgtgctcagggtgaagcgccggttgttccgcaagtcagcgcggaagaagcgacggctaacctggccgagctgctcaacgcaggcctgggcggtagcgacgacgagtaatcgtcatccgcgccgcgggcccggtatgccgggcccatcgccagataaaccgctccctcgggggcggttttttttcgcctcatgccggggccgagcaaactttgctactatggttacagcagaaattgaccggcgcttttaccagacaaccaaggacagtgcgaatatggacagcctcattaccttcgaaaaattgacggcacaacacctgccttacctgtatgagatccgcttttccgttgaagaaaacctgctgcatccgcatcagatccagtatctgcagcgcaggcaggcgctggaggacatcaaccagggcggcggctggatctgcaagcatggcgacgactatgccggcgttggcttcgggttattcatccctgaaccgttgatcggcggcctgttcgtgaagccggaataccagtcgaaggggatcggctccgccttgttggcgcgagtcaccgcctggatgtttgagcgcggcgccgaagcgatccacttaaccaccgatccgggctccaaagccgaaggcttttatcaacatcacggctgggccgtggtcgggcaggatgagttcggccaggccgaactggtgaaatgcaaagagggtgaataatgacaatcaaaggattgatgacgttactgctgctttcgctgttcagcgcaccgctgtatgcggccgttgactatttttacctgaaaccgctcgatggtgagaagatcaagataaccaggcagatgctggaggcgatgccgcatcacacgattaaaacctcgaccaatttcaccccggaagatacgttcaccggcgttgagtttgcagagttagtgaaagcctaccacctgaaaggccagtcagtgcgcgctttcgcctgggatgattactcctattcgatgccgattgacgagatgattaaataccgtgtgatcgtcgcctaccagcgcggcggcaagccgatcgacgttggtgagctggggccgttcgccattatttatccgcgggatggctatgccgagctgaataacctggatgtgaatgcgaaaaccgtctggcaagtgaaacggttggagctgaaataagatgagcaaaaaactgatcggtactcttatcgcgttggttgccatcttctccttattgattttgttgattgccattaacttcggcggcgtaaaagagcgctataagcagatcgagcccaatctggacaactactcggtggccgagatcctgtttctggcgtttgaaaggaccaaaatcgcgctgttgctcagtgaaaacaacgactacgacgccttccagatcaaaaagaaaatcttctactcgaagattcagatcctggagagccgttcgaccttcagcgactctttttattacgacgacgagttcatcaaaaatgttgcgctgctgaagcagcagtatcgcacgttggacgatctttctgccggcttgctggtggggctgaaaaacaaggcggacattctctcttatatggatgatatcgagggtacgctggtcgatatccaggaaattatttatcggatacagattaaaaactttaccgaagtgaaaggcatcatccaggacaactcgagtaaagccgagatgttcgccctcttttcgctgattttagtgttcctgatgatgttcctggtgctgagaaacgccttctcgttgaaagagatcatcaagaacaagaacatctttatctcttccatctaccacgagatcgccggctcgacccaggccatcgtcattgccgcggatatcatggaacatgagctggcgcaggaagagttgaaaaaagaagcccgcctgatctcctatcacggtaacaagatcgccgaacaaacgcgcgaggtgatggattattctcggcttgagatgggagaagttaaaatcaatatttccaccttccggctgaatgaggtggtggccgatgccgtaaccggcatcggcgccgggcgaggcaatcgcctcgtgatccaccgttcgtcttatgccggcctgattggttctgataaatacaagctctaccgaatattggccaacctgctcagcaacgcggataagtttacccaccacggcgcgatcgccctcaatgtgaaggtgtgtcacggcaatctgtatttacgggtaaaagacaccggcatcgggtttaacgtcgataatctggatcggttatataaggcgttcaatcagggggtagaaagggagacgcggcagggattagggctggggctgaccattatcaaaaattacgtcacgacgatgaaaggcaccatcaaggtcaaatccgtcgaagggggtggctcatcgtttttgatccgcattccggtcaaactaattaaagaataggttcgacagcaatagcgaagagataatcagcggcttggtcggtttttccaccaggtgcacgtcatagtgcaggatcatatcgccgatgtttttctcgtagtgattcagctggccggtcagaatgatgatgcgggcgtgcggatcgagggcgtctttaattttcttcaccacgcgttcggaagtctcgccgaagtccaacagccagtccaaaataaacgcctcaaaggactgctgctccagcgcggccagcatggcgtccgccgtctgaaaggtctcggtctcgatgccgtagcggctggcgatcttcttcaacagttcgagaatatcgccgtcattatccaggatcgcgatgcgcggggccggcagaaagtctatcttgttgactttatacagcggggcatcggctgcatattcccgattggtgttgatgatgaaaagatcgtcctttttgtaggcgtaagtttcgtcgttgtccgcttgcgtgaccgggcgctcgtcggcctcaatgttacagcgcttgtgaatgctgttcatgataaacacgccgttatgtgtcctttggccggcaaacggctcgttgaagtactggaaaacctttttgacttcatcgagggtgatgccccttttgccatccagcttctgtttggcgctgttgtactgaaggttcagtatgttggccatcgtggaggcatgttttctgtcgccaactcctttcagagtgagcaacgcgctgattgcatcgatgtaatttggcgttttcttcatgacaaccttggcttttttgatgttaaccgcgagcgttggaaaacctgcgtgaggacccgtgctggattatagatgaagcctcggttattgcggtgatatcagtttgattttccttggcaaactcaaaacacactcgatgacaaataaaaaaacactcaaaagacattcacatttaaccgtttatgtggttaattagcgcacatactgtgtgattcgcgtcctgggggggtgccagtctcacaaaataaaccgcctgctcttgtccgtaagcagggagcaggcggcaaaaagatccgcggccgacaccagggccattggcagcaccggggatggctactcgaacctctcttcgtcgctctgtaccttcttttttcctctttccccacttttctgccgcaacagcgtcctatgagtctcaccgctgagtgagtgtcgagcaccgttatgccacagtcctttagccgacaaggcacctgcccgtacacccttacaggccgcgatacgccatatgcgcgttgctgcggagagggcccggagtcgcgcaagagaatctccggcgcgatccggggggataaggcggggccatcgagagggagacggccccggccggcgccgggtttggcggccggcaaggtcactataatcggcgcgtttgtcggcgccagcaccaccgttcggcattgcgcggccgctccagcgttttcttcacgcggcggtaaacgttgccgcttattgcgcgccgcgtcccagataaccgtcccagtctttccacaccggctgcagcccggcgttgctgatggcctcggcgacctgctgcggcgtgcggccgtcgtgcggttcgaactgttccagctccggcggcacgtcatcggcatagccgccgggctgcgtcttggatccggcgctgacgctgttgatcgccaccgggatcatatgatcgcggaagtacggcgactcacgcgtagacagcgacagctcaacgtccggcgcgaacagccggaaggcgcagatcagctgcaccagttgaggctcgctcatgatcgacgccggctcaatgccgccggcgcaggggcgcaggcgcgggaacgagatcgagtagcggctctgccagtaggtttgctgcaggtaaaacagatgttccgccagcaggtagcagtcggtgcgccaactgttggacaggccgatcaacgcaccgaggccgatcttgtcgatcccggcgcgccccaggcgatccggcgtggccaggcgccaatggaaatcctgcttctggccgcgcaggtgatgctgcagataggtggccggatggtaggtttcctggtacaccagcacgccgtccaggcccagcgttttcagttcggcgtattcctcctgcgccaacggctgcacttccatcatcagcgagctgaagtgtcggcggatcgccgggatgtgctggcggaaatagtccatgccgaccttggtctgatgctcgccggtgaccagcaacagatgttcgaaccccagcgcctggatggctgcgcactcgcgggcgatctccgccgcatccagcgttttgcgcttgatgcggttgctcatcgaaaagccgcagtaggtgcagtcgttggcgcacaggttagagaggtacagcggcacatagaagctgacgacgttgccgaatcgctgacgggtcagctgctgcgcgcgctgcgccagcggttccagatacggcgcggcggcgggggagatcagcgccataaagtcgtcgcgcgtcagcttgtcggcgttcaacgcgcgttccacgtcgcgcgcggttttgccgttgatgcgcagcgtaatgtcgtcccaatccagctgttgccagcggctactgaaatcgtcggccatcactgtgcctcctctggctggctgaggaaggcggtcagcgggctcgaggcgaccgcgccgcgctggctgacgcccaatccggcgctgcgcgccaattcgccggcctccagcgccaggcgaaacgcccgcgccatttgcaccgggtcgcgcgccacggcgatggcggtattcaccagcaccgcgtcggcgcccagctccatcgcttccagcgcatggcttggcgcgccgatgccggcgtcgaccaccaccggcaccttggcctgttcgatgatgatctcgaggaagtcgcgggtgcgcagaccgcggttggaaccgataggggcgccgagcggcatcaccgccgcgcagcccgcctcttccagccgtttgcacagcaccggatcggcgccgcagtagggcagcaccacaaaaccgtctttcaccagcgtttccgccgccttcagcgtttctatcggatccggcagcaggtatttcacatcggggtggatctccagcttcacccagtgggtgccgagcgcttcacgcgccagccgggcggcgaataccgcttcggcggccgttttggcgccggaggtattgggcaacagcctgacgcccaactgttgcagcggcgccaaaatggcgtcgttgccgccgcgcagatcgacgcgcttcatggccatggtcaccagctgtgagccggaggccgccagcgcctccaacatcagcgccggggtggcgaacttgccggtgccggtgaacaggcgcgaggtaaaagtggtatcggcgattttcagcatgtcagcctccggcgatcgcttgaaacagcaaaatgtcgtcaccgtcctgcacctgatggtcggcccagtcggcgcgcgggatgatggtttggttgatcgccagcgcggtacccggctggtggcgttccagctgggccagcagggcggcgacgctgagcggctgcggcagctccagcggttggtcgtttaaacggatcttcatgccgcgcctccgcataccgggcaggcacgggcctggctcagttgcagcgtgctccagctctgctgcttgccgtcgaacagccgcagtttaccgctgagggaagaaggcatgccggccagcatcttgatggcctccagcgcttgcagggtgccgatcacgcccaccaccggaccgagtaccccggcggtgcggcagttgcgctgcggctcttcctgctccgggtacaggcaggcgtagcagccgtgcgcatagggcggctcgagcaccagcagctggccgctgaagccgaccgcgctgccgctgatcagcggcttggcggcggcgatgcaggcggcattgacctcatggcgggtcgccatattgtcgcagcagtccagcaccagatcggcgcgtgcgaccgcgtcgcgcagcgcttgcccttgcagccgctgcgccagcgggatggattccaccaacgggttcagcgcctgcaggtggcgttgcgccagcgccgccttgccggtggcggtatcggcgctgcggtagaggatttgccgctgcaggttggtgacgtgcagctggtcgtcgtcggccagcagcagcgtgccgacgccggcggcggccagatacagcgaagccggggaaccgagcccacctaaaccgacgatcagcaccgtggcgcgcttgagtctctcctggccttccgggccgacgtcctccagcagcagctggcggctgtagcgcaggaattcctgatcgttaagcatcgttcggatcctcgccttcgatcagccgcagcagctcggccgtcgccgcgcgccagtccggcgcctgggtgatggcgctgaccaccgccacgctgccgacgccgcacgccagcaccgccggtacgcgatcgatactgatcccgccgatcgccaccgtcgggtaatccgccaggccggcgatgtggcgtttcaactccgtcagcccctgcggcgccgaaagcatgtctttggtttgggtggggaagatgtgccccaacgcgatgtaggacggtttcaccgccagcgcgcgcgccagctccgcgtcgtcatgggtggacacgcccagccgcagcccggcgcggtgaatggcagccagatcggtggtatcgagatcttcctggcccagatgcacgccgtaggcgccgtgcttgatcgccagccgccagtagtcgttgatgaacagccgcgcctgataacgccggcccagcgcgatggcggcagcgatatcctcttcgacctgctcgtcaggcaagtccttgatgcgcaactggatagtggtgacgccggcctccagcaggcgagcgatccattccacgctgtcgacgaccgggtagagccccagtttgtagggcgtcgccgggaagggcgtcgtgatatcagtcattgctggtctcctcctgcaaattgccggcgctgtgatacagctcgctgccgcgggcgcggaactcggcggacattttctccataccggtcagctgcacctcgatcggtttggcggcctcttgggcagcggcgtagtcgcgcacctcttgtgaaatcttcatcgagcagaattttggtccgcacatcgagcagaagtgggcgatcttgccggattcctgcggcagggtttcgtcgtgataggcgcgcgcggtggccggatcgagcgccagattgaactgatcttcccagcggaattcgaaacgcgccttggacatggcgttatcgcggatctgcgcgcccggatggcctttggccagatcggcggcgtgagcggcgatcttgtaggtgatcaggccctgtttgacgtcctctttgttcggcaggccgaggtgttctttcggcgtgacgtaacacagcatggcgcagccgaaccagccgatcatcgccgcgccgataccggaggtgaaatggtcatagcccggggcgatgtcggtggtcagcggaccgagggtgtagaacggcgcttcgtggcagtgttccagctcttcggtcatgttgcggcggatcatctgcatcggcacgtggcccgggccctcgatcatcacctgcacgtcgtattcccaggcgattttggtcagctcgcccagcgtatgcagttcggcgaactgggcttcgtcgttggcgtcctgaatcgagccggggcgcaggccgtcgccgagcgacagcgagacatcgtaggcggcgcagatctcgcagatttcacggaagtgctgatagaggaagttttcctgatggtgcgacagacaccatttggccatgatcgagccgccgcgcgacacgatgccggtcaggcgtttggcggtcatcggcacgtagcgcagcagcacgccggcgtggatggtgaagtagtcgaccccttgttccgcctgttccagcagcgtatcgcggaacatctcccaggtgaggttttccgccacgccgttgaccttctccagcgcctgataaataggcaccgtaccgatgggcaccgggctgttgcgcaggatccattcgcgggtttcgtgaatatagcggccggtggagagatccatcacggtgtctgcgccccagcgggtggaccacaccagtttctccacttcttcttcgatcgacgacgtgaccgccgagttgccgatattggcgttcaccttcaccaggaaattgcggccgatgatcatcggctccgcctccgggtggttgatattggcgggaatgatagcgcggccggcggccacttcctggcgcacgaactccggcgtgatgttgtccggcaggttggcgccccagccctggcccggatgctggtggcgcagcacctcgccgcgaatgcgttcgcgccccatgttttcacggatggcgatgaattccatctccggggtgacgatgccggcgcgggcgtagtgcaactgggttacgcacttgcccggcagcgctttgcgcggcagcggcaggtgttcgaaacgcaggtgatcgagaccttcgtccgccagccgctgctgggtgaagccggagctggcaccgctcagggtggcggtatcgccgcgtgcgtcgatccagccggcgcgcagcttggccaggccggcgtgcacgtcgagctcggcctgtggatcgccgtacgggccggcggtgtcatacaccgggatcgcctcgttctgttcatactgcgggttatctttgctgccgccgaccagggtcgggctgagctgaatttcacgcatcggcacctggatatcgcggcgcgaaccctgcaggtagatgcggcgtgagtttgggaaagccatgccttgcagggtgtcgataaactgctgggcggcttcgcgttgcgctttacgggcgcgcggtggattaacgttagacatagcaagttcctaccagtgtgttgggttgggaaagttgcttgtctggagctcggagggagtaatgatggtggccgataaggcagggcgcccgcaaggggaaggccgtgtctgtggcgatagattactcttgttcccttcgcgggtattaacccgatcaggttccgcggatcccgaattaacggtctcagcctggctgattcgatgaacaaatcaggcgctaggcactccgacaagatgccccccagtataggagggataagaaaaaaaactataaaattttaacgcgccggatccagcgcctggtccggcagcggttgctgcgtggcttccgcttccagcaggatcagcttatcttccagcgcaaagcgcgccgccagcgtttcgccgatatccgacaaggcctgatggaattccagacaaacctcctgatcgatatccacttcggtatagcgatcgtggaacgccatgatctgttcggtattggcccatagcttggggtagatgttcaccgccagcgacattttcggactggctgcgccttccacttgtttgataattctgtcatagatatgaaaatgccctgcggagaggtaatccaccaggttatggcaaaagttctccagcgctttttcattcagcggcgtatgcttttctttattcggtttgaggcctaccagcgtgcagtaggcgaccagcaactgcttgcgggcctgaagccattgatcaactaattcattactaccgccaacgcgctgagtcagcctttccaaacggttgagcatgtttgactccgtgtaagtaacaaaagtaaccggtaagttattaaaatgtaacaaagccgatttgtagagtgccagtgaagctgaggttgtgcaacaacgatatggaacttgcattaacgggcaatgaaaacggctggtggatcgtcagccatgaaagcaaactttggttaccgaacggtgaattgccgtcggggaccgccgccgccctcgggctgcagggccacatggcgcgcgtcatcggtgagtgggagggcgcgccggtctggctggtgcgccaggcgatgccgcgggagatggggtcggtgcgccaactgctggatcaggatcgcggtctgttccagcttgccgggcgcggcgtgcagctggcggatttctaccgctcccatcgctattgcggctactgcggccatgagatgcacctcagccgcaccgaaagcgcctgcctgtgcggccattgcaaggagcgctactacccgcagatcgcgccctgcgtgatcgtcgccattcggcgcgaggatcagatcctgctggcgcagcacgtgcgccatcgcggcggcattcacacggtgctggccggtttcgttgaagtgggcgaaacgctggagcaagcggtggcgcgcgaagtgatggaagagagcaatattgaaatcaagaacctgcgctacgtcacgtcacaaccctggccgtttccgcactcgctgatgatggcctttatggccgattaccaccagggtgagattcgtcacgatcctaaggagctgctcaacgccggctggtatcgttacgaccaactgccgctgttgccgccgcccggcaccgtggcgcgccgcttgattgaggacaccgtggcgctgtgccgggcagaataatgtacaatggccggcagattattaagggagccccataaatgactgagttgaagaacgatcgttacctgcgcgcgctgttgcgtcagccggtggatgtgacccccgtatggatgatgcgccaggccggtcgttatttaccggagtataaggcgactcgcgcccaggccggtgattttatgtcgctgtgcaagaacgcggagctggcctgcgaggttacgctgcagccgctgcgccgctacgcgctggacgccgccatcctgttctccgacattctcaccattcccgacgccatggggctcggcctgtactttgaagccggcgaaggcccgcgtttcagctcccccgtcacctgccgcgccgacgtcgacaaactgccggtgttcgatccggaagtggagctgggctatgtgatgaacgcggtgcgcaccattcgccgcgagctgaagggcgaagtgccgctgatcggcttctccggcagcccgtggacgctggctacctatatggttgagggcggcagcagtaaggcattcaccaagctgaagaagatgatgtatgccgagccggccacgttgcacctgttgctggacaagctggcggacagcgtgatcctttacctcaatgcccagatcaaggccggcgcgcagtcggtgatggtgttcgacacctggggcggcgtgctgaccgggcgcgattaccgcgagttctctttgcactacatgcacaagatcgtcgatggcttgctgcgtgaaaacgacggccgccgcgtgccggtaacgctgttcaccaaaggcggcgggcagtggctggaggcgatggccgccaccggctgcgatgcgctggggctggactggaccaccgacatcgccgacgcgcgccgtcgcgtaggcgacaaagtggcgctgcagggcaatatggatccgtcgatgctttatgcttctccggcgcgcatcgcggaagaagtggagaccattctggccggtttcggccacggcaacggtcatgtgttcaacctgggccacggcatccatcaggatgtgccgccggagcacgccggggccttcgtcgaggcggtacacgcgcagtcggcgaaataccaccgttaaggatccgatgtgaccgatatggcggctctgcgcgccgaacagctgcggcgcgccgctgaagtcattcgctacgacgagctgccggccgaaccgccggcgttcatcgccggcgccgatgtgggcttcgagcaagagggcgcggtgacgcgcgccgccatcgccatcctgcgctatccgtcgctggagctggtggagtatcaggtggcgcgcatcgccaccgtcatgccttatatcccgggtttcctgtcgtttcgcgaatacccggcgctgttggccgcctgggcgcagctgcggcaaaaaccggggctgatcttcgtcgatgggcacggcgtttcacatccgcggcgcctcggcgtcgccagccatttcggcctgctggtcgatgtgccgaccatcggcgtggccaagaagcgcctgtgcggcaaattcgcgccgctggacgccgccgtcggcgcgctggcgccgttggaagataagggagaacagctgggctgggtatggcgtagcaaggcgcgttgcaacccgctgttcatctctaccggtcaccgggtgggcgccgacagcgcgctggtgtgggtgcagcgctgcatggcgggctaccgtttgccggagccgacccgttgggccgacgccatcgcttcgcgccgtccggcgtttcagcggtggttgcagcagcatccggaggtgtcgccatgagcgatttcgggtacactgcgccgcagataacgcgtaagagagtaaagcatgctacgtaacccgattcatttacgtctggaacggctcgagggctggcaacatttgacctttatggccagtttgtgcgagcgtatgtacccgaattaccagatgttctgcaaacagaccgagttcggcgatccggcggtttatcgccgcattctggatttggtgtgggaaacgctggtggtgaaggatgccaaggtcaacttcgacagccagctcgagaagttggaagaggcgattccgtcggcggaagattacgatctttacggcgtttacccggcaattgatgcctgtatcgcattaggggaactgatccattcgcggctcggcggggagacgctggagcacgccatcgccatcagcgaaacatcgattcgcaccgtggcgatgttggaaatgacccaagccggtaaggaaatgaccgacgaagagttggaaagtttgccggcggtagaggaagaatgggacattcaatgggaaattttccgcctgttggacgcctgtgaagagcgcgatttagacctgatcaaggggctgcgatccgacctgcgagaggccggtgtcagcaacatcgggataaatttagcgcaataaggcaacaaaacgtgatttaacgcctgatttgtcatgccttaaggcttcacatccgcaccctgtctggtctacatttggggggcgtaaaaaaagtggctatcggtgcgtgtatgcaggagagtgctgtcaatcggcatatccgtcgcactcgatgctttgcaaacgataaacacactgtaaggataacttatgaacaagactcaactgattgatgtaatcgcggacaaggctgacctttccaaagcacaagctaaactggctctggaatccaccctggctgcaattactgagtctctgaaagaaggtgatgcagtacaattggttggcttcggtactttcaaagtaaaccatcgtagcgagcgcactggccgcaacccacagactggcaaagaaatcaaaatcgcagcagccaacgtgcctgcgttcgtttctggcaaagcactgaaagacgccgttaaataagaccgcgcctcggtgaaaagattaaacaggggggcgatggcgccccttttgtttactcgtcgggcgctcatggccgttggcatcgccgtcggcctgagcgcctgcagtttccattccgatatccccagctttaccgccagcggcttcgtggccgatcagggcgtgatacgtctgtggcgtaaagacgatgagcaacatcgtccgcaagtgttggtcagcgtttacagcccttaccgcggcccgggtaccattaccacgctgtacacctatcagggcgacgtgctgcgccaaatcaaacgtaacgacgccgacggcgatcgagattccattcagctgcgctttgccgacgatggcacggtgagctttatgcagcgccagctggcgacacgccgcgaaccgctgacccgcgatgaaatcgccctgtatcaatatcaggcgcgacggatcctcgaagtgagcaatgcgctgcgcgccggcaaggtcaaattgctgcaggggcgttggatgcagggcgaggtgcaaacctgcgacgggcagcgcttaaaacccgggttggatgcctccgccatcgcctggatcgaaaaacgcgcccgcagcagcagccggccggtgagcgtcgcctggctggaagcgcccgaaggcagcgagctgctgctggtggcgaacgacgatttctgcagctgggaaccgaaagaagaccagctataaaaaaggccccgcactgcggagcctctggtcattatcatgaaaggtcaaattatttgccgcgcgcaatcgcgcgataaccgatatctttgcggcagaagctgcctggccactgaatgccttccgccaactgataggcgcgttgctgcgcctgcgccacggtatcgcccagcgccgtcacgcacagcacgcggccgccgctggtgacgacgtcatcgccctgcaagcgtgtgccggcgtggaagaccttaccgtcggcgctttcctgctgcggtagcccctggataacctcgccgttgcgatagtcacccggataaccgccggctgccagcaccacgccaagggcagggcgttcgtcccaatcagagctcttctcgttcagacggccttcggcgcccgccagacacagttccaccagatcggagcgcaggcgcagcatgatcggctgagtttccggatcgccaaaacggcagttgaattcgatcaccttcggctggccgtcggcggagatcatcaggccggcgtacaggaagccgacgtaggtgttgccttccgccgccatgccgcgcaccgtcggccagatcacctgatccatggcgcgctggtggatttcgtcggtcacgaccggcgccggggagtaggcgcccataccgccggtgttcgggccggtatcgccgtcgccgacgcgtttgtggtcctggctggtggccatcggcaccacgttctcgccatcgaccatcacgatgaagctggcttcttcgccgtcgaggaactcttccaccacgatgcgatggccggcgtcgccgaaggcgttgccggccaacatgtcgcgcaccgcctcttccgcttcctgcagcgtcatcgcgacgatcacgcctttaccggccgccaggccatcggccttgatgacgatcggcgcgcctttgcggcgcacataggccagcgccggctccacctcggtgaagttttcatattcggcggtcgggatgcggtggcgcgccaggaaatctttggtgaaggctttggagccttcgagctgcgcggcggcctgtgatgggccgaagattttcagaccggcggcctggaaggcatcgaccacgccgatcaccagcggcgcttccggcccaacgatggtcagaccgatgtcatggctctgggcgaacgcgaccagggcggggatgtcggtggcggcgatcgccacgttttccagattggcttccagcgcggtgccggcattgcccggcgcaacatagactttatccgccagcggagactgggcggctttccaggccagcgcgtgttcgcgcccgccgttgccgataatcaaaatgttcatcagaagctccacgaatggcgtgcgccggagcgcacgcggcaaaaggaattaatggcggaagtgacgcatgtcggtgaagatcatcgcaatgccgtgttcgttggcggcggcgatcacttcgtcgtcgcggatcgaaccgcccggctggatcacgcaggtgatgccaaccgccgctgcggcgtcgatgccgtcgcggaacgggaagaaggcgtcggaggccatggcggagcctttcacttccagcccttcgtcgcccgctttgatgccggcgatcttggcggagtaaacgcggctcatctggccggcgcctatgccgatggtcatgttgtcacgcgcataaacgatggcgttggatttcacgaacttggccactttccaacagaacagcgcgtcacgcagttcctgttcggtcggctggcgctcggataccacgcgcagatcggcggcggttaccatgcccagatcgcgatcctgcaccagcaggccgccgttgacgcgcttgaagtccagccccgccacgcgttgctgccactggccgcaggccagcacgcgcacgttctgtttggcggccagcagggagcgcgcttcctgggtgacgtttggcgcgatgatcacttccacgaactggcggctgatgatcgcctgcgcggtggcggcgtccagctcgcggttaaaggcgatgatgccgccgaaggcggaggttggatcggtttggtaagcgcgctcgtaggcggccagaatgtcgtcgccgatcgccacgccgcaagggttggcgtgtttgacgatcacgcaggccggttcggcgaactctttcacgcattccagcgcggcgtcggtatcggcgatgttgttataggacagcgctttgccctgcagctgttcggcggtcgcgacagaagcttcctttacttcttcctctatatagaaggcggcctgctggtggctgttttcaccgtagcgcatatcctgcttcttgatgtagttgaggttcagggtgcgcgggaagcggccggacggctgttcggtctcgccgtggtacgccggcaccagcgcgccgaagtagttggcgatcatgctgtcgtaggcggcggtgtgttcaaaggccttgatggcgagatcgaagcgggtggcatagcgcagcgaaccgtcgttgttgtccatctcggtaatgatggcggcgtagtcgctgctcttcaccacgatggcgacgtctttatggttcttggcggcggagcgcaccatggtcgggccgccgatatcgatattctcgaccgcatcctccagcgagcaatccgggcgcgccacggtttgggcgaatgggtacagattgacgaccaccatgtcgataggcttgatgtcatgctgattcatgacagcgtcgtcctggccgcggcggccgagaatgccgccgtggactttcgggtgcagggtcttaactcgtccgtccatcatctccgggaagccggtgtagtcggaaacttcggtaacgggcagaccggcgtctgccagcagacgagcggtgccgccggtggacagcagttcaacgccgcgctgggaaagcgcttcggcgaattcaacgataccggttttgtcagacacgctgagcagggcccggcggattggacgaggttgttgcatggttttatcccttggctttgagtcgcaattaaagagcgttacgtgaatgtccacctcgttctctctataaagcgcagttttttgccttataaagggagggtcaggcacatattcaggtaacgcccccataaaaagggggatcgtttcgtcgcggggaattgtagcgaaaacgtttgcgtggcgctcgtaaattttccgtacaaatcgcatctgtggataacactgtgcgcaagtgggtataaggcggggttttgctgtggaatgcagcgaacgatcgtttttgctgaaaatacctgttgcggcctgcgaggaactccctataatgcgcctccatcgacacggaacatgtgaacaacttcacagagtatccgggggtcgcagagaaaaaatcctgaaaattagggttgactctgaaagaggaaagcgtaatatacgccacctcgagttagcaagcgaaagcgcctaactcactgctctttaacaatttatcagacaatctgtgtgggcactccacaagacgatatccagcatcttcggatgcaaaaaatatcaagtcttgaagagtgactaactgaagtaaaattcatgcagtaaatctttgagcatcgcttctcgagtggaagcaaatcaagcttttaattgaagagtttgatcatggctcagattgaacgctggcggcaggcttaacacatgcaagtcgagcggtagcacaggggagcttgctccctgggtgacgagcggcggacgggtgagtaatgtctgggaaactgcctgatggagggggataactactggaaacggtagctaataccgcataacgtcgcaagaccaaagagggggaccttcgggcctcttgccatcagatgtgcccagatgggattagctagtaggtggggtaatggctcacctaggcgacgatccctagctggtctgagaggatgaccagccacactggaactgagacacggtccagactcctacgggaggcagcagtggggaatattgcacaatgggcgcaagcctgatgcagccatgccgcgtgtgtgaagaaggccttcgggttgtaaagcactttcagcgaggaggaaggtggtgaacttaatacgttcatcaattgacgttactcgcagaagaagcaccggctaactccgtgccagcagccgcggtaatacggagggtgcaagcgttaatcggaattactgggcgtaaagcgcacgcaggcggtttgttaagtcagatgtgaaatccccgggctcaacctgggaactgcatttgaaactggcaagctagagtctcgtagaggggggtagaattccaggtgtagcggtgaaatgcgtagagatctggaggaataccggtggcgaaggcggccccctggacgaagactgacgctcaggtgcgaaagcgtggggagcaaacaggattagataccctggtagtccacgctgtaaacgatgtcgatttggaggttgtgcccttgaggcgtggcttccggagctaacgcgttaaatcgaccgcctggggagtacggccgcaaggttaaaactcaaatgaattgacgggggcccgcacaagcggtggagcatgtggtttaattcgatgcaacgcgaagaaccttacctactcttgacatccagagaactttccagagatggattggtgccttcgggaactctgagacaggtgctgcatggctgtcgtcagctcgtgttgtgaaatgttgggttaagtcccgcaacgagcgcaacccttatcctttgttgccagcggttcggccgggaactcaaaggagactgccagtgataaactggaggaaggtggggatgacgtcaagtcatcatggcccttacgagtagggctacacacgtgctacaatggcgtatacaaagagaagcgacctcgcgagagcaagcggacctcataaagtacgtcgtagtccggattggagtctgcaactcgactccatgaagtcggaatcgctagtaatcgtagatcagaatgctacggtgaatacattcccgggccttgtacacaccgcccgtcacaccatgggagtgggttgcaaaagaagtaggtagcttaaccttcgggagggcgcttaccactttgtgattcatgactggggtgaagtcgtaacaaggtaaccgtaggggaacctgcggttggatcacctccttacctaaagatattagttcgcgtggcgtgctcacacagattgtctgatagaaagtaacgagcagaaatacctttataggcttgtagctcaggtggttagagcgcacccctgataagggtgaggtcggtggttcaagtccactcaggcctaccacttctcatgaagtggaaaaggtactgcgcgtgactgtatggggctatagctcagctgggagagcgcctgccttgcacgcaggaggtcagcggttcgatcccgcttagctccaccatatagtccggtatttcaatacttcagagtatattggcgacagtatgctgcgaagtattttgctctttaacaatctggaacaagctgaaaattgaaacatgacggctgaaatttgtccctccgtagatgtattgggataaagagtaacctgtcatagagtctctcaaatgtttgcagcgcgaacgatggaaacatcttcgggttgtgaggttaagtgactaagcgtacacggtggatgcctaggcagtcagaggcgatgaagggcgtgctaatctgcgaaaagcgtcggtaaggtgatatgaaccgttataaccggcgatacccgaatggggaaacccagtgtgtttcgacacactatcatgtcatgaatacatagtggcatgaggcgaaccgggggaactgaaacatctaagtaccccgaggaaaagaaatcaaccgagattcccccagtagcggcgagcgaacggggaggagcccagaacctgaatcggcttgtgtgttagtggaagcgtctggaaagtcgcgcagtaaagggtgatagccccgtacactaaaatgcacaggtcgtgagttcgatgagtagggcgggacacgtgacatcctgtctgaatatggggggaccatcctccaaggctaaatactcctgactgaccgatagtgaaccagtaccgtgagggaaaggcgaaaagaaccccggcgaggggagtgaaatagaacctgaaaccgtgtacgtacaagcagtgggagcaccttcgtggtgtgactgcgtaccttttgtataatgggtcagcgacttatattttgtagcaaggttaaccgtataggggagccgtagggaaaccgagtcttaactgggcgattagttgcaaggtatagacccgaaacccggtgatctagccatgggcaggttgaaggttgggtaacactaactggaggaccgaaccgactaatgttgaaaaattagcggatgacttgtggctgggggtgaaaggccaatcaaaccgggagatagctggttctccccgaaagctatttaggtagcgcctcgtgaactcatcttcgggggtagagcactgtttcggctagggggccatcccggcttaccaaaccgatgcaaactccgaataccgaagaatgttatcacgggagacacacggcgggtgctaacgtccgtcgtgaagagggaaacaacccagaccgccagctaaggtcccaaagtcatggttaagtgggaaacgatgtgggaaggcatagacagccaggatgttggcttagaagcagccatcatttaaagaaagcgtaatagctcactggtcgagtcggcctgcgcggaagatgtaacggggctaaaccatgcaccgaagctgcggcagcgacgcttaggcgttgttgggtaggggagcgttctgtaagccgttgaaggtggcctgtgagggttgctggaggtatcagaagtgcgaatgctgacataagtaacgataaagcgggtgaaaagcccgctcgccggaagaccaagggttcctgtccaacgttaatcggggcagggtgagtcgacccctaaggcgaggctgaaaagcgtagtcgatgggaaacaggttaatattcctgtacttggtgttactgcgaaggggggacggagaaggctaggctggccgggcgacggttgtcccggtttaagcgtgtagggggtgtgacctggtaaatccggttgcatattaaccctgaggcgtgatgacgatgcactacggtgcagaagtagttgatgccctgcttccaggaaaatcctctaagctccaggtaacattaaatcgtaccccaaaccgacacaggtggtcaggtagagaataccaaggcgcttgagagaactcgggtgaaggaactaggcaaaatggtgccgtaacttcgggagaaggcacgctggcatgtaggtgaagtccctcgcggatggagctgaagccagtcgaagataccagctggctgcaactgtttaataaaaacacagcactgtgcaaacacgaaagtggacgtatacggtgtgacgcctgcccggtgctggaaggttaattgatggggtcagccgcaaggcgaagctcttgatcgaagccccagtaaacggcggccgtaactataacggtcctaaggtagcgaaattccttgtcgggtaagttccgacctgcacgaatggcgtaatgatggccaggctgtctccacccgagactcagtgaaattgaactcgctgtgaagatgcagtgtacccgcggcaagacggaaagaccccgtgaacctttactatagcttgacactgaacattgagccttgatgtgtaggataggtgggaggctttgaagcgtggacgccagtctgcgtggagccatccttgaaataccaccctttaatgtttgatgttctaactcggccccgtgatccggggtgaggacagtgtctggtgggtagtttgactggggcggtctcctcccaaagagtaacggaggagcacgaaggttagctaatcacggtcggacatcgtgaggttagtgcaaaggcataagctagcttgactgcgagagtgacggctcgagcaggtacgaaagtaggtcttagtgatccggtggttctgaatggaagggccatcgctcaacggataaaaggtactccggggataacaggctgataccgcccaagagttcatatcgacggcggtgtttggcacctcgatgtcggctcatcacatcctggggctgaagtaggtcccaagggtatggctgttcgccatttaaagtggtacgcgagctgggtttagaacgtcgtgagacagttcggtccctatctgccgtgggcgttggaagattgagaggggttgctcctagtacgagaggaccggagtgaacgcaccgctggtgttcgggttgtcatgccaatggcattgcccggtagctaagtgcggaaaagataagcgctgaaagcatctaagcgcgaaacttgcctcaagatgagtcttccctgggcctttaaggcccctgaaggaacgtttaagactaagacgttgataggctgggtgtgtaagtgcagcgatgcattgagctaaccagtactaatgatccgtgaggcttaaccttacaacaccgaaggtgttttggtgagaccaagacaatattcagcttgtttacagattggattgacaggcttcagcgatgaagcgggttgattaaaacgaatttgcctggcggcaatagcgcggtggtcccacctgaccccatgccgaactcagaagtgaaacgccgtagcgccgatggtagtgtggggtctccccatgcgagagtaggacactgccaggcatcaaataaagccgaaagccctgaacgtcagttcagggctttttgctatgtgcaatacgtaaaaaagcgcagctacgctgcgcggttttccccctcctccttattctccgccagcgagccagagaaaaggccccgaagggcctttgattagggtgtgtttgcttttttcacttattattcgatcaatgcgagctgccctgagagatgcccagcccggtttgcgaacggacaaactgggcccggaagcgttcccgctcctgctgcccggccagcgagctgtcggtgatcgagaacagccaggtgccgacaaaggccacgatcatcgagaatagcgccgggtattcatacggataaatcggtttctcatggccgaggatctgcacccagattgtcgggccgaggatcatcagaatcaccgccgttaacagacccagccagccgccaatcatcgcgccgcgagtcgtcaaacgcgaccagtacatcgacaggataatgatagggaagttacagctggcagcgatggagaacgccagcccgaccataaaggcgatattctgcttctcgaacaaaatccctagggcaatggcgaccagccccaataccacgacggtgatcttggagaccttcagctcatcgcgctcggtcgccttgccatttttaatcacgctggcgtacaggtcatgggacacggccgaggcgccggccagcgtcaggcctgcaaccactgccagaatggtggcgaacgccaccgccgagataaagccgaggaagaagttgccgccaacggcattggccaggtgcaccgccgccatgttggtgccgcccagcagcgcgccggtggcgtctttgaacgccggattggcgctgaccagcaagatggcgccgaagccgatgataaaggtcaggatatagaagtaaccgataaagccggtggcgtagaacacgctcttgcgcgcttccttggcgtcactcacggtgaagaaacgcatcaggatgtgcggcaggccggcggtgccgaacatcagcgccaggccaagcgacagcgcggaaatcggatcggacaccagcccgccggggttcatgatggcgatgcctttcggatgcaccttcaccgcttcggcgaacagggtattgaagtcgaagttgaccgacttcatcaccatcagcgccataaagctggcgccggccagcagcagcaccgctttgatgatctgcacccaggtggtggccagcatgccgccgaacagcacgtacagcaccatcagaatgccgaccaggatcaccgccacgtggtagttgagcccgaacagcagctggatcagtttaccggcgccgaccatctgcgcgatcagatatagcgccaccactaccaacgagccgcaggccgagagggtgcggatcggtttctgctgcagacggtaagaggcgacatcggcgaaggtatagcggccgagattgcgcaggcgttccgcgatcaggaacagaatgatcggccagccgatgaggaagccgatggagtagatcagcccgtcatagcccgaggtgtagaccaatgcggagatgccgaggaacgaggcggcggacatgaagtcaccggcgatcgccaggccgttttgcaggccggtaatgcgcccgcccgcggtgtagtagtcctgacgggaacgggtgcgtttggacgcccaataggtgatgtagagcgtggcaccgacaaacaggataaacatcacgatcgcctggatgttcagcggttgacgatgcacctcgccgccaatggcgtcggcgcaggccaggcccggcagtaatagcagcgcggcggcggacaataagcgcttcattgtttcacctcgcgcaggatctctgcggtgaggcgatcgaactcgccgttggcgcgaaacacgtagatcccggtcaagacgaaagagatcacgatcaacccgacgccgaccgggatcccgcgggtgatggtcgatccggcggcgatcggcgtaccgagccattgtggatcgaaggcgatcaacaaaataaagccgacgtacagcgccagcgtaatcagcgaaagcagccaggcgaaccggccgcgttttctcaccagctctttaaagcgcgggttttcttcaatcccttgataaatggtgtcattcatcagagtgtctccagtcggtattgagagagtacgccgcgccagggccgctcaacggcgcgttatccgaatgagcggcctgaagcggcgtaaattatgacggcactttcattgattgtttttcttccaacagcttgtcgactacggccggatccgccagcgtggaggtatcccccaggttgctggtgtcgccggcggcaattttgcgcaggatgcgccgcatgatcttgccggagcgcgttttgggcagtgagtctgtccagtgcagcacatccggtgtagcgatcggccctatctctttgcgcacccagttgcgcacttcggtatagagctccggcgtcggttcttcgccgtggttcagcgtgatgtaggcgtagatcgcctggcctttgatgttgtgaggaatgccgaccaccgccgcttcggcgattttcgggtgcgataccagcgcggactcgatctcggcggtgcccagacggtggccggagacgttcagcacgtcgtcgacgcggccggtgatccagtagtaaccgtcctcgtcgcggcgggcgccgtcaccgctgaagtacatgcctttgaaggtcgagaagtaagtttgctcgaagcgatcatggtcaccgaacagggtgcgcgcctgacccggccaggaatcgacgatcaccaggttgccttcgcaggcgccttcctgcggcgtgccgacgttatcgaccagcgccggctgtacgccaaagaacggccgcgtggcggaaccggctttcagctcagtggcgcccggcagcggggtaatcatgaagccgccggtttcggtttgccaccaggtgtcgacgatcgggcatctcgcgttgccgatcttgttgtaataccactcccaggcttccgggttgatcggttcgccgaccgagcccatgatgcgcagcgaatcgcgtcgggtgccttcgatcgccttgtcgccttcggccatcaacgcgcgaatggcggttggcgcggtatacagaatgttgacctggtgtttgtcgatcacctgcgacaggcgattgacgcccggatagttaggcacgccttcgaacatcagcgtggtggcaccgcaggccagcgggccgtacagcagatagctgtggccggtgacccagcccacgtcggcggtgcaccagtaaatgtcgccgtcgtggtagtcgaacacatacttaaaggtcatcgcagcgtagaccaggtagccgccggtggtgtgtagcacgcctttcggcttgccggtcgaaccggaggtgtacaggatgaacagcggatcttcggcgttcacttcttccggcgggcagtctgcggagacgccctgggtcagctcatgccaccacagatcgcgcccttcctgccagtagcccggtttaccggtgcgtttgaataccaccacgttggccacgctgaccacgccgggatttttcagcgcatcgtcgacgttctttttcagcggcacggcgcggccggcgcgcaggccttcatcggcggtgatcaccagtttggcgttggagtcgataatgcgcccggcgacggcttccggcgagaagccgccgaagatcaccgaatgtacggcgccgatgcgcgcgcaggccagcatggcgaccgccgcttccggcaccatcggcatatagatggccaccacgtcgccttttttaacgccgagctgtttcagcacgttggcgaattggcagacatcgtggtgcagctgtttgtaagtcacctttttggattgggtcgggtcatcgccttcccagataatggcggtttggtcaccgcgctcggccagatggcggtccaggcagttggccgccaggttcaacgtgccgtcttcaaaccagcgaatgctgacgtggcccggatcgaacgaggtatttttaactttggtatagggtttgatccaatccaggattttgccatgctcaccccagaaagcctctgggtcttgaaccgactgttgataatactgttggtattgtgccggattaatcagggcgcgttctgcaattgcagaaggaatagcgtgtttatgcagttggctcatagcttttctccttgaagttgttaatgatatgtcaactgaaggttaagtatagtttgctacgattctttgtttcttttttgcgcggcagatcacgcaacaaagatattgatttgtaatcgttctgtcgcatttgcagggcgtatctatctctttggcgcttaaatcctcataaacccacgtttttaaccaaaaacacttatataaagaacaaaaaagaataaaccaaaacggactcaactgccgcgaaattaatagatacgatcagggccgccattatttctcgctataaatctttttgggttgtttttcgctattaatattctaagttggcattagcacgatataacgatggactgcaccgcgtgaaataacgttttattaacgcttaattcctgatgaaaactcgggaaataccctgtggcattcatcctgcggtatcgttcgatttttaatcgaaatataaagtggcgctgcatttatggacgaaagtgtcactcggccaattctcatttgtttgacttttgagtaacaaaatataaacatacgatgcggattaaatatgcagaatgagcgaaaaataacgcattttaatcgcgttcaaaaaaccgtcgtcggcgcggttatgtacttcattatatgaaaaattatgtttttaataacaagcaattatgccatttgaaatagttacgcgaaatttttgtgattcgattcagcgctcaagcctgacaaatcaaggcttgcagagcatgccgcccggatgatacagatttatactgcgtcgcacccagggcaggtgaacgcttccactgaattaacataagcctgtaataaatgattaagtattcttttcgccgtgttgcgactttgtacggcgcaaagagtctttgaggactttttgggtatgaaaagtgtaaaaattagcctggcttggcaaatcctgatcgcgttggtactgggtattattgttggcgcggtattgcacaaccagaccgaatctcgtgagtggctggtgagcaatattctcagcccggcgggtgatatctttattcgtctgatcaagatgattgtggtgccgatcgttatttccacgctgatcgtcggtattgccggcgtgggggatgcgaaaaagctgggccgcatcggattgaaaaccattatctacttcgaagtgatcaccaccgtcgccatcgtggtggggctcaccttggccaacgtcttccaacccggccacggcatcgatatgtcgacgctgaccacggtggacatttcgcagtacgagaaaaccaccgaacaggtgcaaagcggttcgcacagtctggtggcgaccattctgtcgctgatcccgtcgaacgtcttctcgtcgatggccaagggtgacatgttgccgattatcttcttctcggtgctgttcggtctggggctgtcgtcgttgccgaaagagaccaaagagccgctgctgaaggtgttcaaggcggtgtccgagagcatgttcaaagtcacccacatgatcatgcgctatgcgccgatcggggtgtttggcctgattgcggtcacggtagccaacttcggtttcgcttcgctgctgccgctggccaagctggtggtgctggtgtacttcgccattgcgttcttcgccctggtggtgctgggggcggtcgcccggctgtgcaacctgcgcatctggacgttgatccgtatcctgaaagacgaactgatcctggcttattccaccgccagttcggaaacggtgctgccgcgcatcatcgaaaagatggaggcttatggcgcgcccaagtcgatcaccagcttcgtggtgccgaccggttactcctttaacctggatggctcgacgctgtaccagagcatcgccgccatctttattgcccagttgtacggcatcgagctgtcgttggggcaggagatcgtgctggtgctgacgctgatggtgacctcgaaagggatcgccggcgtgccgggcgtctcgttcgtggtgctgctggccaccctgggcagcgtcggcattccgttggaaggcctggcgttcatcgccggcgtggaccgtatcctggatatggcgcgcactgcgctgaatgtggtgggtaacgcgctggcggtattggtgatcgccaaatgggagcaccagtttgatcgcaagaaggcgctggcctacgaaacggagttcctggcgcagaaggtgaagccggccaaccaggcctaattaccgagtatcgccgacgttgaaaacgccccaggcagttgtgccggggcgttttgtttttatggctcttcaaccggccactttcttttctctgtcctactgcgcgacttgcatccccgcttaacagaatctaaagtgttaccaaattaatagaaatgataatagatgttattatcattttcatttgatgatgtatggagacacgcaaagccgttgaacggtggggttacgcccgttcggcgtctttattcaggcttatcaaaggtaggtaacatgtcggacaccgctttggcctctgaatggttgccgctggcgccagcgcagcttgatttctgggaagaacacaccttgcaccctgggcagactctgtccaccgtcgcacattgcaccgaactgtgtggcgcggtagaggaagaggcgctctgccgggcgatcgccaccactctcgccgagacgcaggcgtttgccttgcgctttggtgagcggcatggcgacgctcccccgccgttacgttacgatccacagtgcacaccgccattgcaacgcatcgatctgcaaacgcacggcgatccctggcaggcggcgcaaagcctgatgcgcgaagatatcgcgcagcgccgggcgctacatagcgagccgctagccgcagcctggctgctcaaattggggccggagcgctacctctggtacgtgcgtgcgcaccatattctgattgatggcttcggtatggccctgatcgaacaccgctgcgccgcgttatatgcgcactatctgggtgagggtagcgcgggtatgcccctgggtgcctttaatgtctttcaacaggccgagctggcctacgctgattctgagcgatgcgagcgcgatcggcgcttttggcagagctatctgccgccgtcgcaggcgttgccgacggtgcgcaagggcggcagggagtatggcgtgcgacgtctgagcgtcaaccgtcggttgtcgacagaagtcgcgcaacgtctggcgcagcagtcggaacgcagcggcatcaattggcccgacttgctggtggcgctgtcggcggcctggctgtttcaggtgatgccgcgcggtacccggcagggcgatacgctgccgatgtggatgccggcgctgaatcgccgtgggcaggccgccaccaacgtgccttcgctggcggtcaataccctgccgctgctggtgtcaccgccgcaagcggagacgctggggagctttctcaccacgctgacgcagcagctgcgggagctgcgcagccacgccggctaccgcctgcgccaactggccgccgatcgcggcgtggatccggactcgcgcttctttatttcccctttcatcaacgtgcaacccttcgatacgccccgttttaccggctgcagcggtacgcgcagcgtattggccggcggctcgggcgacggtttcaacctgacttatcgcggccgcaccgacgcccgcgatctgcaggtggatatcgatatctatctggagcagtttccgacggaggatgcgctggactatggcgaggcgctgcaagaatttctgttgcgtgcgctgcagcgggaagcctgggagcaaccgctggcggccctgacggcgttgcccgcctgagaaagtgcgggcgggagggtgctcccgcccgagtggcaggacttcagctggccagcaacgccgccacttcgcgcgcgttcttgcacggcaagagcgaactgcttaccagacgggtgccgaaagcgtcattgaggcgcgacgccacctgtttgatatgcggcagcttcagccccatggcgataaacgccgtctcttccccccattccgggcgtggggtcacgccgatcgcctgccagtaaatggtcaggatctctgcgctgcgcgccagcggcgcgttcggcggcggggccgcgcaggcgttcaacgccggcgcggtttgctggtggctcaggtcggcgcggatgcgatggcgatcggttttaccgttggcggacagcggcagcgcctcggcatggataaagcgcgtgggaatatgggtacagggcagatagccggtggcgaaggcgcggatctcggacagcggcagcggtttgccgtcgcgggtcagatacagggcgccgagcgccgcttcgttgttctctccgctgggataatccaccaccaccatatccaggatcgccggatggcggcgcagcacgtcttcgatttccggcagcgagacgcgcacgccgcggatcttcacatagccgttcacccgggtggcgaacatgatgttgccgtccgcacggtagtagccctgatcgccagtgcggaaagcgcgcagcggttgtccgtccggcccttcgagggtgatgaaatcgtgctgcttcagctccccctgctccaggtagcccaacgccaggttcaccccggcggtatggatgcggccgaccacgccggccgggcagtggctgccgtcgtcatggcagatgaaataacggttggcgggcagcgggcggccgtaaggcacggtgccgctctcctgcggggtgataggatgccagatgctccagatggtggtttcggtcggcccgccgagcgagaacagcgcgagatccgggcgcagggttcgcagggtttgcaccgtcgccggcttgatgtagtcgccgccttgcgccaccaggcgcagcgaacgcaggctgtcggccgttttgcaggtgagcagcatctccagaatggccggcaccgaacaccacaggctgacccgatgtttttccaccagctggttccagctgatggcgtctttttcctgatgcggcgccggcagcaccagcgtagcgccggcgcacagcgaaccgaacagatcgaacatcgacatgtcatggtgcggcggcgtgacggaaatgaacacgtcgtcggcggtgaccgcccagcgctgctgggtctggtggataacgttggcggtggcgcggttgttgagcaccacgcatttgggcttgccggtggtgccggaggtatacaggtagtagcttgcggccaggctggcgctgcgttccaccaacgtctgttcatccggcagcgcaggcgcgcgatccgtcggcgccagcaggatcgccggcgtcacgccgatcggcgtctccagatcgccgccgtgcaccaccagcgttggccggcagttctccagcaggtaggcggtgcgttccggcggtgagttgatatcgataggcacccagatcaccccctgcagggcgcaggcgaggctgaagatgatctgttctgggctgcgcggcagatacagcgccaccacgttgcccggctgcacgccgcggctttgcaggttggcgatcgccgtggcgatctgctggcccagttcgcggtaggtcagcgtctgttcgccgcagatcagcgcgttaccgccgttttgtgcgccaaacagccgctcggccagctgcgccagataaggataaggcgcgtaattcgcttcgctgtcgttgtggcggtaatgcgccagatcgatgaaatctcgcggcgcgatcgccaggtcggcgcgttggcaactgcgcaggatgcgtcgctgcaacgccgccagcatggcttctacctgctcgccgtgcagcgcctgttcggcgtagtccacgcacagctgcaggtttttttcgctgtccagcgtcaggcgaatatcgatggcgacctgcggcgtttgggtcaggccgtcgtgaaagcgcaccggcgcctcggccggcagcgtttcccaacccagacagttggtcaggatcaccggcagcgccgggccgccctggctttggccgagcaactgccgcgccagatcgacgccggaaaacgccaggtgatcgagcgcgccgagcacatcgtcctgcaaggcttgcgcgcgctggataaagtcttcgccatagcgcgaatagcgcaccgccacgaagctggaggcgttgcccagcgcgccgtcggcggcggggaacgccaccggcaccccgacgcacagctccccgtcggtggtccagtgggccagcgtatcgaggatcagtgccgagagcaggctgttgcgcagcagcgcatgcggcgatcccaggcggccaagctgttttaccgtatcgcgcggtagcgtcaaggtggcgcggcgatagcgtgatgaggtgagattggcgagcggggcgcgccacggcagtgccgacggggtggtgacatcctgcagcttttcacgccagtaggcggcatcggcctggcgctgcgccgccgatgcggcggggggcggcagtgtggcggcggtcgaggtcagagggcgatcgtcgaacaggcgcgcgatcacggtggagatcccctggccgtcgaggatcaaggcatcaaagctggtaaagatcagcatatcgtacggcgatcccgtcggatcctgctgttcggcaagttggatcacggcgatgcgccacagcggttggctcggatcgtggcgctggtgggagtagcgctcgcgcagctgttcgacctggcgctgcgccgtttcgccacccagggagcgaagatcgtggcgatccagatgcagcgtggtttccgggcgtacgtgctgcgtgccgcgctgcacatcgatgcaggtgcgaagcgccgggtagtgctgtaccagctcggtcaggcgcgcttcaaggcgcggtacatcctgctgccgggcgcggtattcgcgaaagtcgtgcatcgctacgccgccgagcggccatcgatcgctgcggcccagaaggtaggcctgctgcagtgcggttaatggtgtctccatggtacttccctatagtcgctaaccgattaaaacgagccgggcaccgtgcgcccggaaaccgatctcagtgctgcggcgccagggcggcgagcagcgtttttgcatttcgccccgcctcgggcgaccgttggcagatcaacgccgccagcgcagccggggagggatgcgccgtcagatcctgcgccgtcagcgccgccgccagatacttgttgagcaccgtcagcagcgcgttcaccccggcatccggcaaggccaaccggcggatatcgtcgtggtcgcgcacattggcctcgggagccacccgcgccagcagccggtgcagcacttggcgcaccggcgcctgctgcgccagcgcgtcgggcgtgcattgcgccagcagctgcgacagcgggcgatcgaacgcccccgcttgccgcgcggccaggtgcagcagcgcccggtaacaggccagcaggcgcggcagcacgtgctcggggaacgcgtccagccgcacgtcccagttgatcagaatgccgtcgtcgacgtgggcgacctgcgcatccagcgccacctgcggcccctgagagatcacccaaccgagacggccaaaggtgttggtgacccgttcggaaaacagcgttttgccgcggatgccgaaaccggcggtaaacaccaccggcgaaggctgcaggctgccgtgcaggcgcgacagatcgcgcatcacgctgacgccggggtaatccgcatgctcgatcagctccgccagctgcgtcatcaggcgccggcagaaggcgttcaggttttccgtcgggttcagttccacgccgagcagcaccaggttagagaaatcgccgatgaggcgatgtgcgtcctcccgttcgctctcgcggtggaacagcggcacgttgagccgaaagcgcgtcatgttccacccctggccgacggccagcgcgaacagcgccagaaacagcgtcgagagggaggtgtggtgccgcttggccacactctccagcgcgcggctttcttctgcattcagctgtatggccaaacgatcgctgcggcagcggtccggcgtgcgcaacaggcgcggcgccggcggcacctgcgccaggcgagcacgccaccaacgctggccgcgttcgcgccgctgacgcagcgcctcgtcggcgtcgcgtcgttctaggtgatcgaagtaggccggcggcgcgtcatgggagggcgccgccggacactggtgataaaacgccgccagatcctccatcagcaggcgaaagctcatggcatcgccggcgatcatgtcgagatcgacgtgcaagcggctgcgcccttccggcagcaggctcaggctgatgtcgcagggaacgccctgttccagcggcagcagctgggtgcttttcgcctggcgtttggcggcgagcgcggctgtcagcgttgcttcatcggtgtgtcgccagtcgtcgagatgcaaagtatgccgggagccgggaggtgcgatcgtctgcctgccatcgtcggtaatgcgcaggcgtaacagcggatgacgcaggtacaacgcctcgacggcctggcgcagccgggcgatgttcagctcgccgccgtcgaattccgcataaagatgggcggccatgccgcccagagggggagcggactgtcggccaacccaataggcggcctgcatcgtggtcaaagctttcatcgggtatccattttgattcagccaacgagactgcaagaatatatccaaatgttaataggaatgaaaattattattatttgatccatttgacgcgagggtgctatctataaggggttttagctgtaacgggcaggcatggggttgggtgtgaataatttattcatattattcttagcattgtaattattgtctgttattgcagcgcttgttttacctgcgaaagtataaggttttctggcggttatcgtggccgctctcacacctttattgataatgatttgcattagaaaatgcaaaatattatcattcttaacattattttacgtttttatacaagccgtcggccgctccgccggcggcttggccgtggacgggccgcgcccgttcggccgcgaaagacatgggtttgccgcagggataagcaacagcaaggccgggaaggccgcagcgtcatggtctgtgtgagtgtcgatgtaggttgtgtaaaaaaaatcaaattttgtgcacctctgggatgaaaggagaagacatctatgggcaagcattttgcggctcaacggcatgaaagcgtaggaaacggggaaaaggcggggttaagagccattggggcgttttcctcggtatttttaggcgtgtgttcactggcgatcggtaacgtcaacgcggcggaaacgaagagcaacgaaacctaccaggacgcggaaacgctgctggtcaccggtgagaagatcaaacgttccattttcgacaccggctccagcgtgcaggtgttcgacagcaaccgcatcgcctcgatgcccgacgcggtgcagatccccgatctgctgcgcatgacccccaacgtggtggatctgggcatcggcaacgaactgccgaccgtgcgcggtatcgacggttccggcccgaacgtcggggccaatgctttcctcagcggcacccgcccgcgcctcaatctgtcgttggacggccgttcgctgacctataacgaacaggcgttcggcccgcagtcgctgtgggatctggatcgcgtcgaagtgttcctcggcccgcaaagctacatccaggggcgcaacgccatcgccggcgccatcgtcatggccagtaaagacccgaccttcgaatgggaaagcgccttcaagggtggagccggcaaccagcactcgtcacagttggccgccatggcgtctggcccgctggtggaggatcagctggcgttccgcgtcagcgtcgatcgccagcgccgccgcagcgaggctgacctgccggcctatgcgccagtgggcgatccgcgtgaagtggaagccaccaccgcccgcgccaagctgttgttcaatccggccggcctgcgcgatctgaccactaagctgacctttaaccacttcggcagcaccgcaccgcaaaacgaaagcctcaacccgcagccgcatccgaccaatccgcgtcacgatccgcgccgcgccgtgttcaaaagcaacatgaacagcactatctgggatctggcctgggaggcctccgatgcgctgacgtttgaaaaccgcgttatctacaccgatttcaacatcaaccgtcctaccgcttacaacatccaatacgccgagatcgacggccaggaagttcacgtggagccggtggtgcgcttcggtggcgcggacagccgcctgcacgggctggcggggctgcgttacttccacggcacgcaggatgagttcgtcaacattttcggcggctcgaccttcaaggataaaaccgatacccattcggcgttcgccgagctgacctatgcgctgacgccgcaggtggacgtgaccgccgccagccgtctggaacgcgaacaccgtcgccgcgacggcggcagccaggcggtgcgcatcgattttgatgaaacctacaccgtgttcctgccgaagctggacgtggcctggaaaccgacggatacccaaacctacggcgccaagatcgcacgcggctataacgccggcggtggcggcatcacgatcggcacgccggtggtcagctatacctacggttccgagtatgtctggaactacgagctgtacacccgtcatcacctgaaagacgccaacgtggtgctgacgggtaacatcttctacaacgattacaaagacatgcagctgccgtactcgctgggtgagaactccagcgtgatccgcaacgccgacaaggtggaaacctacggggcggaaatcggcgccacctggcagccgcgctgggacttcgagctgttcggcaacctcggcctgctgaaaaccgacatcaaaaagttctcgggcagcggcgtggaagggcatgagctggcgcgcgcgccggcttacaccgccaacatgggggccaagtatcagttcctgaaagggtgggagctgagcagcaacgtggcgttcaccgactcctactattcgcaatacgacaacgactcgcgcgggcgcatcggctcctattggacggccaacgcccagctggcttacaccttcgactacggccgcgccacgctgtatgcgaagaacctgtttgactccgaccgccgcgagatgatccgaagcaatgacatctacacggcgacgctccagcgcggccgcctgatcggcgcggcggttgagctgactttctaacgctatcgcggtgacgggggacgcatgtcccccgttttgtgcgctatcccggcacggccgggcaaaggagataacgcagtgatcggtgattttgacagcattctgagcgatgaagaggcccagcggctggagagcgcgtttcaggcgctgggcgcggcgtcggccaacggcgagcggtcggtaagcgaagccgaagagcgggcatggttcgcccatctgcagcagggtgacgcacgcgggcagcgggcgctggcctggcgcctgacgggggaagtggatatcgcccggctggcggcggcgctgcaggcgctggggcgggagacgccgggcgtggacgtgcgctacgtttttgatgacgaaaacgggctgattaaacgcgccgccggttcggcgccgttaccggtgagccttcgtcaggtggcggacgaacagcacgccattggctgcctgctgcaggcgcaggcggcaccgtttgaactggaaaacgaagcgccgctgcgcggcttgctgttgctcacgccgggcgatgccgtgattttgggcgtggtcttgcatgacatcctggcggaaacgctgccttggcgccacctgccggcgatgctgtccgcccgttacaacggggatgtgatgcctctgcctttcgcggcggagccggtcgagctggcggaaaccacggagccgcaactgccctgggcgcgccaggcggtctcgctgcaggattaccgcagcccggcgccgcgtgctgaagcgttgccgccggtgggcgcgcgcgtggtcacgcgcattgatcgctcgctgttgcccgccaacgacacgccgcgggccttgctggcggcggtggcggcgcggtttgccgagttcgtcgccgcgcaggccggcggccaagcggtgcagctgtgcgtgccggccgcggaaacggcggagttcgtcggcctggagcttggcctgacggcgccgccgctgatgcgcctgaccgtgcagcatggcgagagcgacgtcgggcagcggctgctggtgcaggccgtggctgaacagccggacccgcaacgggcgcagctgctggtggcctggcgcgacgatctggccgcagagtggcggctggaaggcgttcacgccgagcgcatgttgctgccgccgctgcatacgccgtttgaactggcgctgctgttgggcttgccagaggcggaagcgctgacgctcgagctggtcaccgatccgcgcctgtctccccatgtggcgcctttcctgctggagcagttcagcgcgttcctggccgggcagcggattgccgtcgccttgccggcggctgaggccgcttccccggcgatggccgcgccggcgacgaacggcgaggcggacgaaagcgttgcaccgctgattttgcaggagttccgtgaggcgctggtggcgccggaaatgaccctggatgaagacttcttcgatcgcggcggccattcgctggtcgccacccgggtgatcggccgcttgttgagcctgcatcagatcgaaatcaacattaacgatctgttcagccatccgacggcgcgtgggctggcgggctacgccaaacgtctgaacgtcgcgcagccgaatgccccggtggccgccgccgacgatcatgatcgcgcgcaggcgccgctgtcgctggcgcaggaatcgctgtggaaggtgtatgaagccttcggccatgacgagattttcaacctgccgttctctctgcgcttcttcgatgcggtggatgaaacggcgctgcatcaggcgtttatcgacgtcatgactcgccataccgtgctgcgttcacgctttgttgagcagctgggcgaggtggtgcaggtggtggtgccggccgccgaactgccggattactcatggttccgcttctctcacgagacgccggcgggcaacgccgccgccctgttggccgacgccggccagcaccggttcgatctggccgccgagctgccgctgcgcgtcacgctgctgcgcgatgcggacaacggccagcagctgctgtcgctgctgttccaccatgtggtgctggatgaatggtcgctcaacctgatgatggatgagctgggcatcgcctaccgccatcgcgtcgtcggccaggcgccgcagtggagcgggcaaccgccgcagttccacaccttcgcccggcagcagcgggcctccggggtgcagcagcaacatctggactactggctcgatgcgctgcgcggcgcgccggtcggccagccgatcttccggcaagaaccctctacccacccggcagtgccggcgccggcggacgtcaacggcggctggctggagttcgaggtcgatcccgctgtggcggaaggcctgtatcagctcgctcgccgcaataacgcttcgctgttcaacgtggtgtatgccgggatcacctcggcgctgcgcctgcttggcggcccggcggatctgctggtgggcacttcgacctccggccgtaacgacgccgagttcttcgataccgtcggctacttcaccaccgtggtggtgcaccgcgtgcgcttcgacgaagggttgacggtggccggcttggtcagccaggtgaaaaacaccatcaacggctcgctgccatacaccgacattccgatcgatctggtggaagaagggctgttcggcgtggacgccgaccgcaagaaccacatgtttgaagtgttcatccagatccacagccgcatcaaactgaacggcgagttccggctgcaggacggcagcgcgatcgcctaccgtcaggtggagccggagaaagccgaatcgttgctcggcctgcagtttgaggtgatggaagacgatctggggggggcgaaatccctgcgggtgatgatgacctaccgccaggatcactacagccgggagcaggccaatctgatcgccgacggcgttcagcacgtctttacccagtttgcgcagcacatcgctggcgatatcgctctggcggcgctgccgcccgggccgcaggcatgacgttgtttcactctaaccgaaagcatgattttcaaggagataaaaggatgtctggaaccctagcaaccccgcgcgcgttactgtcgctgctggtggcggcctctctggtggtcgccggcgccgcgcaggccgacgatgccggcatcaaaccgcaggacatcaagcgccaggcgctgtcgtcgacggtggtggagatggcctacagcacctcgcaacaggcgctgttcgtcagcgcgccggactggaaggaagaggcgcgctcccgcgtgctgcggctggatcccaacaccctggcgatcaaggcggagatcccgttgcaggtgaaaggcttcggcgtggcgctgaacgacgcgggcaatcgcctgtacctgacgcaggccttcaacggcgaagtcggggtagtggacaccaccaccaaccacgcgctgggcagcatcaagttgctggacaaagcggtgctggagcaggcttacaagcaggcgggcatcagcggcaagcgtctggatttcctgttggcggagctgaagaagtttaaaatcaccgaggactacctgtaccgcctccgcgagctcaagtatgacgcgcaaagcggccgtctgttcctgccgggtctgggcttcggcgtcgacagcgtgctgtatgtggtcgataccaaggccggcaagctggagaaagtgatcccgggcttcggctacaacgcggtgggcatcacgctggatgagaagggccgccgggtgttcgtctccaacatgcaggggcaggtgatcaccctgaacgccgacacgctggcgatcaccgccacgcacgaagtacaggccgatcagctgctgaacctggtgtatgacccggcgagcaatcgcctgctgggcgtcgatcagggcatcgatcgcgacgactaccgcaatcatcatctggggcacgactatgtgaagcgcagtagcggccaccgggtattcgcgctggatgcggacagcggaaaagtgctggccagcgagctgacggatgaggtgccgatcggcctgttgctcgatgagcgcagccagcggctgtatgtcgccaaccgcaaaggcgtgcgcgtggatcacggcgccggcacgctgacggtgttcgacgccaagaccctcaagcgcctgcaaaccgtagacctgccgccgcaccctaacagcctggcgctggatccgaaaggcgacgcgctgttcgtgacggtgaaaaacgacggcgctgccaccaaggccggcaagccggaaagcgtggtgcgcattcagctgcacaccaggtaactgaattgcaaaggtaaaaaaaggggcgccgcggcgcccctttttcgttgggtcatgtcatcagaagtgggtgttgatgctcatgtagtaggtacggcccgattcgttataggtggctgcgcctgcgccatacatgtaggagttggttttcgcgttaccgacagtttgtgcattaccggcgcggaattggcgtttgtcgaacaggttgtcgatgccggcggtgaggctgacgtttttggtcaggtcataggtcgcgctggcgccgacgacggcgtaagggctgacctcgcgggcttctgagccgacagcgctctctcctttatagttatacttcttcggtttctggcggccgtaccaggtcagggtggactgcatcgacagatcctgcgtggcctgccagctgagggtcgagttgacggtgaacttcgggatcaccgacaggtaatcgccggtggtcttgttcttgttctcgatcatgtaggtggcgttgttgctccaggtgacggtctcgctgaccggcacgttcaacgagccttccagcccctgcaccaccgccttcggcacgttttcccactgatagatatcggttttaagactgtttgaggaaattggcgcatagccagcctcaattttgttgcggtaatcgttgcggaagtaggtcacgccggccagccagccgtcgttatggaactccagcccgatctctttgttaacgctggtttccgctttcaaatcgtcgttgcccatcagatagcaagcgccagcactggctgcacaaccttgaccacggctatacaggatatagttaccgttgttctggaacagattgggcgctttgtaggagcgtgcgatccccattttcaacgtgaagtaatcacccagttcctgcgacagattcagcgccgggctccagttgttgccggattcggagtgcagatcgtagcgcaggcccggcgtcagcatggtggtgtcggtcagctcgatattgtcttcggcgaacagcgagaagatatgtgcggaggaataaggactacggttagagctgtccactccagggatcgctccaccttcggtgagagactggctggtggaggtgccgtctttcatccgttgctgagaccactcggtacccagcgtggcggtttgcgcgacgcccagctcaaacggcacgctgacttcgctgtgcgccaggaagtcgtccagcttgattgtgccgaaaccggtgttattggtgtcgaagatgccttcggtgccaccggccaacccttcgttcaggcgggtgttgcgggtgcgctcaaactgcacgtagttgttggtgctcacgccgttgtcccaggcgccgcggtgggtcaggccgaaggtttcacggtagatgcggttggtctctttgccgtaattgctctgcaccagggggttggtgttggtgttctgggtatcgccggcgtacaggttgccctggcggccataggcgtactcgaactccaatgactgcagatgggcgaaatcccagtgcagcagagcgtcgatgtttttatcgaccaccccttcacgtccggcaggtaaggtattggaatagctgccggtgcgctcggattgatggccttggttaatatcccaggcatcggcctgcgttttgctgtagccgccgaacaggcggaagctcagggaatcgctcagcgggccggacaggctgaaatcggtgcgcttggtggcgccttcctgcttgtgctgcggcacgttgaagtagccgttcagcgagccgtgcagcgcatcgccggctttcttggtgatgatgttgaccacgccgcccgcggcgccgttgccgtagcgtgcagcagcggggccgcgcagcacttcgatgcgttcgatcatttccggcggcacccaggcggtatcgccgcgggagtcgcgttcgccgcgccaaccctgacgcaccgagttgcggctggaggccggtttgccgtcgatcagaatcagggtgttttccgggcccatgccgcggatatcgatctggcgattgttgccgcgctggccgctggtggagttgccggtcaggttaaccccgggcatggtgcggatcagttcgctgatgtcgcgcgccggcgggcgttttttgatctcgtcggcggtgatggtggacacccctggcgcctgcaggttctgccgggcggcggtcacgacgatggtgtcttcgccgcgcggctttttatccgtggcgccgctgttctcttccgtggtggtggtgtcggtttgctgcgcggcgctggcgaacgcggacgcgcccaatcccaagccgataagagtggctaaagaataacgtgatagcttgcttttcatctgagtgtcctaccttgctgccatccctcgccgaacggggggaagggcggttgtagtttttgtgtagtcggaaatagaaaatcggctgcggcaagggatgccattgatgtatccccgatccctgtccgttgcgcgcaataccagcacgatctccaagccttacacactattgcaaatgcaaattattatcaatagtatttggcgtacagtgcgttcgggcggtggccggcgatagggaaaagtcgacgttcccggtgccgccaactacaaaatgggtaggcgttgtgaatacagaactacagtcagaaagcagcagattattggccagcagcaatgcgggcagtccagggtggtggttgacggtggcacgacgcggtacgccatgggtagaaccggcgggtaacggccgctggcgcaccacctttttctggcgcgatccccagggatgcgaattgacctccgcctaccgtcgcgtgtggatcaacattaactgcctgaccgaccaccatcagccgaatccgccgcaaagcctgcagcgtttggccggcaccgacgtgtggtattggcagaccgaactgagcggcgcctggcgcggcagctactgctttatcccctgctttgacgagcggccgccggcgttcagcggcgacgatgcgcacgccaacatgcacaacctgcgtcactggtggcatcaggtgttcgccagcgctacccccgatctgctcaacccgtatcgctcctggcaaagcgccagcggtcacagcgtctccggtctgcacatgccggatgcgccgccgcagccggtatggcgttcgttcgacgaatatgagatcgccagcgggcgctgcacgccgccgctgccggcgcgtttgcagcggcatacctggcagagcgagcgcctgggcaacagccgcgatgtctggatctacaccaccggcgacagcaagccggccgagcgcccgctcgcgatcttgctcgacggccagttctgggcgaagcagatgccggtttgggcgccgctgatgcagctgacccgcgagggggcgttgccggaagcggtttatgtgctgatcgacatcatcgatctgccgcaccgggcgcgagaattaacctgcaaggacgatttctggctggcggtgcaggaagaactgatgccgcagctggccgactgggcgccgcacagcgacaagccggccgatacggtggtggcggggcaaagctttggcggcctggcctccctgtatgccgggctgcgctggccgcagcgcttcggcgcggtgatcacccagtccggttcctactggtggccgcggcgcgacatgctgcagctgccgagcattcccgacgacgcctgctggctgatgcaacaggtagaacggcacggcttgggcaaccacggcgcgctgaaggtctttatggaagccggttcgcaggaaaaactggtgcatcgggtcagtggcgaaatggcggcgcgcctgagcgacgccggccatcgggtgcactaccgggtggtggagggcgggcacgatgcgctgtgctggcgcagcggcctgaccgatgggctgcaggcggtatgggcttccgctttcgccaccgcttacccggcatcggcgacggcacgaggaacacatgatggaaagcctgaatccgttcgatgatcaacagcagcgcagcctggtgctgcgcaacgtacaacaacaatacagtttgtggccggatttccgcgccattccgtccgagtggacgatcgtctttggcccggcggcgcgcctcgagtgcgccgaatggctggaacagcattggcaagatattctgccggtcgcagcacgcgaggcgtgaccggcgccaggtaatcacgggagcaataagcagtgtcacacacccctaactctctcagcggcccggcgcttgcgggcgaatggccgctggtcgcggcacaacccggcatctgggtcgccgatcaaatctccccgcatcgcaatgcctacgcggtggctcacgccatcgaactcaacggccctgtcgccgtggagcctctgctgcaggccatcatccagggtctgggcgaggtggacatgctgcgcctgcgttttgcggaacgcgacggcgtgccggtgcaatggctggatgacacgctggcggtgcacgcgccggaacttgtcgatctgacgacgtcgccggatcctgaagccgccgcgcgcgcgctgatggacatcgatctggcgagcgatctgcgcgccggcagcggcgcgccgctgtatcgtcatgtggtgatgcgtctggcggatgaccgctggttctggtatcagcgctatcaccatctgctggtggacggtttcagcttcaccgccatcgcgcgccgcgtggcggcgatttacacccatctttgccgcggcgacgcgctggaaccgacgcctttcacggcgttcagcgacgtggtggcggaataccaggcttaccgggaggcgccggcctggcaacgcgacgccgatttctggcgcgaaaaagcacggcagctgccgccgccggccacgatctgcccgcagccgctggccgggcaaacgcccacgccgcgcatccaccggctggaacagcgctgcgatccgcaggccttcgccgaactggtgcagtgcggcgcgcagcagaagctgaacgccgccgatatggcggtggcgctggtggcgctgtgggtgtcgcgtctgagcggccaaccgagcttcagcgccggttttatcttcatgcgccgtaccggatcggccgccctgtgcgccgccggcccggtgatcaacgtgttgccgatggagatgcacctcgagccgcaggccacgctgtatgaggccgccgcccgcatcagccgcgagctgaaaacggtgcgccgccatcagcgctacgacgccgaacaggtgcagcgcgatctggggcgcatcggcgacggcgaaccgctgtacggtacggtcttcaacttcaaaatgttcgattaccagctggacttcgccggtatcgaaggcattacccacgatctggcctccgggccggtgcgcgatctggagattgcgctgtttatcgacgaacaccatcagctgaaggtggagctgctggccaacgccgagcgttacagccgtcaggaactgctggcgcatctgcagcggttgccgctgctgctggcgcagttcgccgcgcaggcaacgttgccgatcggcgaagccgacatgctgaccgccgacgatcgcgctctgctggcgcgggtcaacgacacggcgcatccggtgccggcgaccacgctgagccaactgctggcgcagcaggcgcaaagcacgccgaacgcgccggcgctggcggatgcgcatttcagcttcacctaccgcgaaacgcgcgaacaggtcacggcgctggcgcgccagctggttgtgcagggcgtacggccgggcgacatcgtggcggtggcgctgccgcgctcggtgttcctgtcgctggcgttgatggcgatcgtggaagcgggcgccgcctacctgccgctggacaccggttatccggacgagcggctggcgatgatgctggaagacgccgcaccccggctggtcatcaccagcccggcgcagcaggcgcgtttcgccgacaagggcgaaattttgctgtatgacgcaccgctggcggccgatcacgccgccggggtggcgatcgcgggcccgacgccggatcatgcggcctatatcatctttacctccggctccaccgggcgcccgaaaggcgtgctggtcggccatcaggcgatcgtcaaccgcctactgtggatgcaacaccagtatccgctgggggcggacgacgcggtgctgcagaaaacgccgtgcagtttcgacgtctcggtgtgggaattcttctggccgctgatggtcggcgcccggctggtgatggcgccgccggaggcgcatcgcgatccgcagcagctgcaacagctgatcgcccaacatcgcattaccacgctgcacttcgtgccgtcgatgctggcggctttcgtggccgccctggacgacgacgcggcggtggcgagctgcgccgcgttgcgtcaggtgttctgcagcggcgaagcgctgccggcggagctgtgccgcctgtggcaaagccgcacggcggtgccgttgcacaacctctacggcccgaccgaagcggcggtggacgtgacctggcatccggcctacggcgacgcgctggcgaaggtgaccggcgccaacgtgccgatcggcctgccggtatggaacactgggttgcgcattctggacgcgcgcctgcggccggtgccgccgggcgtggcgggcgatctgtatctgaccggcgtgcagctggcgcacggctaccttggccggccggatctgaccgccagccgctttgtcgccgacccgttcggcgagggcggacggatgtaccgtaccggcgacgtggcgcgctggctgccggacggcgcggtggaatatttgggccgcagcgacgatcagctgaagatccgcgggcagcgtatcgagctgagtgaaatcgatcacgccttgctgtcgctgccgggcgtgcgccaggcggtgacgcacgcgctggtgttgcagggcactccggtggacgccggcggcgatgcgcgccagctggtgggctatctggtgatgcagccaggcgcgagctgggatgcggaagccctgcgcgcggcgctggccgaccgcctgccgccgcacatggtgccggtggcgctggtggaaatgcaggatttgccgctgagcgccaacggcaagctggatcgcaaggcgttgccgcagccgcagagcggtgagcgcaaggcggggcggacgccgcaggccgggttggaaagcgagatcgcggcggtattcgcccgcttgctgcagcgcgagcaggtgttcgccgacgacgatttcttcgcgctcggcggccactcgctgctggcgatgcgcctggcggcggagctgcgccgcgatctgggcaaggcggtgtccgtcggccaggtgatggtggcgtcgcgcgttgagcaactggccgccttgctggcggaagatcgcacgcaggaagaggccgatcgcagtggcttcgacagcgtattgccgctgcgcgttaccgaggggccgacgctgttctgcctgcacccggcatccggcttctcctggcagttcagcgtattgccgcgctatctcgaccagcactggtcgctggtcggcatccagtcgccgcggccggacggcccgctggcgctgagcgaagacatggatcaggtggtggatgctcacctgcagacggtgttgcaggtccaaccgcacgggccgtaccacttcatcggttattcgctgggcggcacgctggcgcagggcatcgccgcccggctgcaggcgctcggcgagcaggtggcgttcctcggcctgctggatacctatccgccggagacccaaaactgggacgtgatgctggacgacaacgtgttgaaggaagtgcagcgcgagcgcgagcagttcctggcggtgtcgcaggacacgctcgatccggcgctgggtgagacgcgcacggcgatgttcgacaacatcgaagccaactacgccgattcggtgcggttgttgtcgcacacgcggaccgcccgtttccacggccaggcgacgctgttcgtcgccaaacgcacgctgcaggaagggatggacgtgcagcaaacctggtcgcagtatgtcgatgcgctgcaggcgcacgagctggactgcgcgcacgtcgatatcgtttcgccggcgtcgttcaaagtgctggggccgctgctgaaccggatcttgcgcacgctgtaatgacgccctcatcccgccgccaggcacggggattgccccgcgtttggcggcgtttcttgcggtcgctaacaattgaatatcaatgatttttattatcattattgatttcgtcatctgtgctagcatagcgctccgcaactgcagaatccccgtttaaagatgtggtgaacaaccgatgagtagcaaaccctccatcctgcttgatttcagcctgctgaaaaccaaccgggctttccgcgcggtgttctgcgcgcgctttatctccattgtggcgctgggactgatggcgatcgccatcccggtgcagatccaggcgctgaccggttccaccctgcaggtcgggctggcggtgacgctggccggcggcggcatgttcgccgggctgctgatggggggcgtattggccgatcgctatgagcgacgccggctgattctgtttgcgcgttccacctgcggcgtcggatttgtcggcctgtgtctcaatgccctgttgccgtcgccttcgctggcggccatttatctgctggcggtgtgggacggcttctttggcgcggtgggggtgacggcgctgctggcggccacgccggcgctggtgggccgcgaaaacatcgtgcaggcgggcgccatcagcatgctgacggtgcgcttcggctcgattctttctccggcgatcggcggcctggtgatcgcccatatgggcatcacctggaactacggtctggcggcgttcggcaccctgctgacgctgctgccgctgctgagtctgccgcagctgatgccgccgccgcagccgcgtgaacacccgctgcgcgcgctggcgggcggtttcgccttcctgttccagaacaaggtgatcggcatggtggcactgatcggcgcgctgctgaccatggccagcgcggtgcgcgtgctgtacccggcgatggcggaaggctggcacatcgacgctgcccacctcggttatatgtacgccgccgtgccgctcggcgccgccatcggcgcgttcaccagcgggcgcgtggcgcatgtggcgcgccccggctgggtgatgctgctgacggcgatcgcggcgttcgccgccatcggcctgttcggcctgatgccgtggtacagcctggcgttactgtgcctggtggcgttcggctacctgagcgcgctgaactcgctgctgcaatacggtctgatccagagcctgacgccggacaacttcctcggccgcatcaatggcctgtggacggcgcagaacgtggtgggcgatgcgctgggcgcgttgctgctgggggcgatgggcgcctttatgctgccggcgatgagcgccagcggtttcggcttcggcgcggcgctgctcggcatcctgttgctgttcgccatgaccggtttgcgccaggttacgctgcacaaaccggagccgcagcccgccacagaaaagtagtcgaacgcgttaaaacaacgctgtgggatcaaatagcaatgcttatcatcggcatgcgtaaaacccacagcgtttatgtcatgatttcgaaatgaaagaagtgcttacgtttattgacatagcaaatatcggcgagtaatttagcgcggaattaactcaaatgataatcattattatattggttatcacttcaaattcttgagggcgaagcgatggatactgccgtgaacgacatcaatcgaaaggaagtgcaggagtgcgaagagcagcgatttgccgctgatttttctcccgcgtcgggcttcttctttacttctcctttccgtagtctgaccaccaccggttgtttcagccgcattcgcctgccggccgcagacggcgccgatctgaacggcgagttccagcgcagcgtacggcaggcgtttgccgaggcccgccaggccggcatcaaaaagccgctgctgtgcggcgccatcccgttcgatacccggcagccttcggcgctgtttattccgcagcagagccgctggttcgatcgcgccgcctttatggccggcgttaggccggcggcggatgggccggagctggccggggtaacggaactgccgccacagcagccgttcatgaatatggtcagcgacgccgtcgacgcgatgaaggccggtgagttggacaaagtggtcttgtcgcgcctgctggagatcgaaacgcgtcagccggtggatcgccatgcgctgatggcgcgcgtgattgcccaaaacccgcacggtttccatttccatgtgccgctggagcagggcgcgctgttgggcgctagccccgagctgctgctgcgccaggacggcggccgtttctattccaacccgctggccggttccgcccggcgcgaggccgacccagagcgcgatcgcgaagtgggagagcggctgatggcctcggcgaaagatcgccacgagcaccgcatcgtcaccgaaagcatgcgtgacgtgctggccggccgctgccgctacctgaacgtgccgcaaacccctgaactgctgaccaccaccacgctgtggcatctctccacgccgatcgacggcgaggcggcatctcccgacgaaaacgccctgtcgctggcctgcctgttgcacccgacgccggcgctgtgcggcatgccgacggcccaggcgcacgccctgatcggcaagctggagccgttcgatcgcggcctgttcggcggcatcgtcggctggtgcgacgatgaaggcaacggcgagtgggtggtcaccatccgctgtggcaccgttgacggcaaccgggtgcggctgttcgccggcgccggcatcgtggaagactcttcacccgaatctgaatggcatgaaacaggcaccaaactcagcaccattctgcgtgcctttggtataaatcaaggataacgacaagatgagcattgcctttaccccctggccggcggagttcgccagccgctatcgcgagcgcggctactggattgacaaaccgctgaccgagatcctcgaccgccaggccaacaacgacgccccggcgatcatcgacgcccagggcagcctgacctaccgcgagctgcagcagcgctccgatcgcctggcagccgctttgctgcgccgcggcgtgaaatccggcgacaccgcactggtgcagctgggcaacgtggcggagttctatatcgtgttcttcgcgctgctgaaaattggtgtggcgccggtcaacgcgctgttcagccatcagcgcagtgagctgaacgcctatgccgagcagatcaaaccggcgctgctgatcgccgatcgccagcacgcgctgtttgccgacgatcaattcctgaacgccttccgcgatgcgcatccttcgctgcgcgtcgtggcgctgcgcagtcaggccgagggcgagctggcgctggccgcctggctgaacgaagcgagcgacggtttcgtcgcgcagccttccgcggccgatcaggtggcgttcttccagctttccggcggcagcaccggtacgccgaagctgatcccgcgcacccacaatgattactactacagcattcgccgcagcgtggagatctgccgcttcgacgcgcagacccgctatctgtgcgcgctgccggtggcgcacaactacccgatgagttcgccgggcgtgctgggcgtgttttatggcgccgggctggtggtgttcgccgccgatccggacgccgggcaatgcttccgcctgatcgaacagcaccaaatcaacgtgacggcgctggtgccgccggcggtcacgctgtggctgcaggcgatcgaagagtggggcggcaatgcccagctcgccagcctgaaactgctgcaggtgggcggcgccaagctgggcgaaacgctggcggcgcgcattcagaacgaaatcggctgccaactgcagcaggtgttcggcatggcggaagggctggtgaactacacccggctggacgatgacgaacgccacattctggcgacgcaagggcggccgatgtcgccggacgacgaagtgtgggtggcggatgacgacggcaatccgttgccggcgggcgaggtcgggcggttgatgacgcgcgggccttacaccttccgcggttactaccagagcccggcgcacaacgccgatgctttcgacgccgacggtttctactgctccggcgatctgatcagcatcagcgaagacggttacatcaccgtgcaggggcggcaaaaagaccagatcaaccgcggtggggagaagatcgccgccgaggagatcgagaacctgctgctgcgtcatcctgacgtgatcaacgccgcgctggtgtcgatgccggacgcgctgatgggggagaagagctgcgcctatatcatcgccaacgcgccgctgaaaccggtggtgctgcgccgtcacctgcgtgaacagggcgtggcggacttcaaactgccggatcgctttattcaggtggacagcctgccgctgaccccggtcggcaaagtggacaaaaaacggctgcgccagcagctcgacgcgcaactacagactcaggctcaggctcagggagattaatcgatggccattccaaaacttaatgattacgcgctgccgacggcggacgaactgccgcaaaataaagtcatctggcaggtggagccgcagcgcgccgcgctgttgatccacgatatgcagcagtatttcctcaacttctggggcgaggacagcacgctgattaaacaggtggtggagaacatcgccaacctgcgccgctactgcaagcagcagggcatcccggtgttctataccgcgcagccgaaccagcagagcgatgaagatcgcgcgctgttgaacgacatgtgggggccgggcctgaacaagcaccctgagcagcaggcggtgaccgccgcgctggcgccggacgaagacgatacggtgctggtgaaatggcgctacagcgccttccatcgctcgccgctgcaggaaatcctgcaggagtccggccgcgatcagctgatcatctgcggcgtgtatgcgcacatcggctgcctgaccaccgccatcgatgccttcatgcgcaacatccagccgttcatggtggccgacggtctggcggacttctcgcgcgacgaacacctgatggcgctgcgctacaccgccggccgctgcggccgggtggtgaccaccgcgtctctgctgccggcggccggcatcgccagcattgatgcgctgcgtcagcagatcctgccgctgctggacgaagacagcgaggacatgggcaacgatgaaaacctgatcgattacggcctggattcggtgcgcatcatggaactggcgacccgctggcgcaagatccgcggcgacatcgactttatcgcgctggcgcgcaacccgaccatcgacagctggtgggcgctgctttccgaagagaaagcctgattttaatcacgagcagagggcggccgttcggccaccctgttggctttataaggagattttgatgaatactttgatcaccaagggaaaacgtgcggcatttccgctgatgctgctgtctacgctgctgttctccaacactttgcaggcgcaaaccgcgccggaagtgctgcgcaagccggtcggcaaaggcgcctatgaaatggcctacagcccgagcgagaacgcgctctacctggccacctcgcagagccgcaagctggacaagggcggcatcgtttaccgtctggatccgaccacgctggacgtgacccaaattatccataacgacatcaagccgtttggcgccgccgtcaacgccaagaccggcacgctgttcttcggtaacaccgtcaataactcggtgaccgccatcgacgccaagaccggcgacgtgaaaggccgcctggtgctggacgcgcgccagcgctccgaaaccgtcaagccgctggcgccgcgtgaactggtggcggatgctgacagcgataccctgtacatcaccgggctgggggattccagcgtggtgtgggtggtggacggcaaggatctgaccctgcgcgccaccgtgaccgacaccggcaaatacggcaccggcctggcgctggacgccgccgccaaacgcctgtacgtcaccaacgccgacggcgagctggtgaccatcgatacccagagcaacaaggtgctgtcgcgcaagaagctggatgagtctaaagagcacttcttcctgaacatcagcctggataccgccacgcaccgcgccttcatcaccgattccaagcagccgcaggtgctggtggtggatacccgtaacggcaacatcctgagcaagatcgacgtgccggaatcgctggcggtgctgttcaacccggcgcgcaatgaagtgtacgtcacccatcgccaggcgggcgaagtgagcgtgatcgacgccaagagctacaaggtgctgaacaccatcaagacgccgacccatccgaacagcctggcgctgtcgccggacggccagacgctgtatgtcagcgtcaagcaggcttccagccgcgaaaaagaagccaccgcgccggacgacgtgatccgcgtagcgctgaagtaatcccgcgcagggtaagtatccctcgaacaggcgaagcggcgacgctccgcctgttttttttcgccgtgcgatctacggtataaagtgtggattgccttattgacccgaaggaacgttggttatgcccgtctcacgcgcaccgctgttgttgtccgttatcactctgctgctgctggccgcgctgatccacagcggcatcagcccttacgatcgcaccacctggctgatggaggtggcgccggtcttgatcgttttgccgctgctgtggctcccccaccgccgttacccgctgacgccgctgctctacacgctgattttcttccacgcgctgatcctgatttttggcggcatgtacagctatgcccgcgtgccactggggtttgaggtgcagcagtggctggatcttgatcgcaacccgtacgacaaactggggcacttcttccaggggctggtgccggcgctggcggcgcgcgagatcctgctgcgcggtggttatgtacaggggcgcaagatgctgggcttcgtggtgtgctgcatcgcgctcgccatcagtgccctgtatgagctgatcgaatggtgggcggcgctggcgctgggccagggcgccgacgagtttctcggcacccagggcgacccgtgggacacccagtctgacatgttctgcgcgctgctcggggcgatatgcggcctgttgctgttcgggcgctggcaggatcggcaaatcactcgcttagtttgataaatttcaaacagaattagcccgccgttatggcggggttttttatatatatcgcaatgaacgttgtcgcatcaagcgaaggccgggagccttaactgcgccaaggttccgccgttctctatgatttgctgtttatatttcattgttttatatgaacttatatttaatttgtaagaattttcttattataattgctgtgctaatatcatgttgtttggtggggaattggcgttgacatggtttgtagcgcagggaatgtatgagatacataattaataataatattaaatatcacgaagatagatcggaattggtctcggtgcatgacgatatcccgccgattatgctgacggccacactgaaccgcctgctttccacattagtcagaaacaacaatctggtgttatccagagagacgttgttgacgcaggtgtgggaggctcacggtcaggtcgcttccggtaataacctcaacaataccatttcaattttacgcaaggcgttctcttcgcttggcgaggaggagatcatcgtcaccttgccgcggcaaggttttatgttcaccgccgctacgatcaaaacggcggacagccaggcgcccgcagaggatccggctccggaggtgggccaggatgtgggtatcccctctgaggtaggctccgccgctgtacgcagctatacgcgtttcaaagccgccgggctggcggctttgttggttctggcgttgggcagcggtatttgggcgtggtgcgatgcaggctatcagccgatcagcacgatcgacggggggcgcatcgacagctgcagcgtgcgccttatcaccacttatcacaagccggcaatcaacaaggtcgatttggatcatctgcgcgacatgctgaagcggcggccgcagattcactgcaacgaaccggcgacgctgctctactacgacacgcaaacactggtgccaaacggcgccgggagaacccgaacgtcctatttctattactgcccagagtcgcaaatggcggataacaaggtgcaatgcgagagtttctatgaaagctggggcctgtaagcgatgaaacgatatggttacgcgattgcggcgttactggctatggggtgctgcgccatcgccggttactttttatttttcagaccgcaaatcccggagtgccgggcggttgaacacgtaactgacaacattgccggccgcagcgttgaacgcattgttctgataaatgtggttcccgatggcccgcggcgtatcaacatattattgaacggcagagtctatgacggtaaagagcactatgttgtctcacgtactctggttctggattatcgatggcagggcaataactatacgctgtgggtgaaggaaaatatcaagaaaccgcatgactcgataaggcttgaggattttaatcggcggttgccggtggaaggtatgcagttacactggcgtatcgagcaaattgatagccggcatttcttgtttgccgataaccatgcgccgttatttgtgtgtgctacaccctaagatgaatccccttggttaggacaaggggatcctgagagtgagatggcctggtgaggtaacatcttgcaatatcaatgctattctttgtcgatataattgtagatacacgggctgcttttttctcgcgggcagaaggttaacagctctttgcctttctgcgaagcctcatcgcgaatgttatcatagtaatacacgtcagctttacttctacaattaaaaccagcgcgctggataaatcgcttgatttcggataagtggccgctccccgaattcatgctgtatatttggcagcgatcgtagtcacctaaaggatacatgctgatacgggtggcgttttgataaagcacgatagcggcaaacggcaccaggcaggctaaaaatgccagcagaagacgcctgaatgggctattggtgccattatgcagcacttctttattggttagtttactgacctcattatctccctctggattgttttccggtttttttacctcctcattgttatttacttcatgaatgatatctgcggtgaacttaaacccctgacgcggataggtgacaataagcgcctcttcgccgaactgcgccagcgatttgcgtaaccctgatacataattattcagattgttgttcgaggccttaagaccatgctcaacccagacatcattaagcagcctttcacgcattaataacacattattgttacggatgaacagtgataacagcctggcgctgggtctaagtaagactattttagttgccgcattatcaatatgcgacaatgtgttctcatcttcatcatagagaacgttgttatttatatggaagatcattttttcaacctgtcaacttacctgtcgagagatgattctgagacctgcgtgctgttttttcaatccttcgtattaatggtcaataggatttttccctctattcatataattatattaatccgggtctaagtgtataagtattaaaaaataaataaggtcatttaatttctattttttggtatttaaatctatttaatgtgtatttttcatatttaaatcctgtgtttttgtctttttgcgacataacgttttatttttgatctgggcggggtaaatttgttgccactgatacggaacgctgaaaggcaggtatcagcgaaagaatctgcgctcgataataaagcggcgcgttaaacatcaagagtgaattgttgatctaattgacgtcaatgagtacctctttcttactaaggaatgtaagggatttaatatgaaactgaataaaatcatgatggcagcagtattggctttcggcgtagcgtctgtggctcacgcaaaagaccagggccacggcaccgtaacctttaaaggcgcgatcattgacgcaccttgctcaattaccccggaaaccgtagaccagaccgttaacctgggccaggtttccaacgtggcgctgaaaaacggcggccagtctacgccgaaaaacttccagattaagctggaaaactgcgagctgaacgctggtgatgcaaatggcgttggcaagaataatgctgtagctatcaccttcaccggcgcagcttcagtagaggacgctaagctgctgggcattaccggtactgctaagggcgctggcatcgccatcaccgacggttccggcaaggtgatcgagctgggtaaagcttcttcagcgcaaacgctgggcaatggcaataacaccctgagcttctccgcttacctgcagggtaacaaggcttctaacgctgttatcaccccgggtgacttccagtccgtggctgacttcaccctggcttaccagtaagtccggttgtgcagtgataatgcagcatgcgggcttgcccgcatgcttttcccgggattcgtgcggtggaaattctgtgaatagggagcattcaatgagttattttcctgcaaaattaatgcttccctgcctattgtccttaatgttaatcgtggataacgttcaggccgctcgccccagtcaaggatggggacaggtcaatatgcaaggagccattatcaataccgcctgcgctattgccgccggcagtcgggaacagttaatcgatatggatgtcacaccggttgcagatattattcgtgacggcagcgggggagctagttatttctccattgagctaattaactgtgttttatctcgggctgagagtaatttgccagactggagtggttttcgggtgacttttgacggggatgccgacggggagttatttgagatgcatggtggggcaaaaggcatcggattgcaaatcgtcgatgcagaaggaaatattgcccacccaggaaacccattgcccattcgagaagtattgccggaaagaatgctgcttaactaccaaatgcggctggtcgctaataatcagccactgcaggcaggagagtattattctgcggtgcgttttaaaatggactattactgaggctgagctctgccgataaatactattaaataaacagggtcgtggatatgtttttttctcctgcatggaagctgtttcgtcctcatgcgctaagtatcggtatatttctggcgttagcgcatttaacgccaaaggcagaagccgagtatggcattcagtttaataccgatattttggacgtgaacgatagaaaaaatatcgacctgagccagttttcacgcagcggctatatcatgccgggcgcctatgccatggtgattcatcttaataacaatgaattgccggaacagagcgtcagtttttatccgccggatgacgatgctcagggcagccaggcctgtatttcaacggcgctggtggaacagctggggctgaaaccggatgcgtcgaaaggactgcgttggtggcatcaggacgagtgtctggatatcgccagcctgaagggcatggaggcgcgcggcgatttagccacggcggcactgtatttgagcattccgcaggcttatctggaatattcctcgcctgactgggatccgccgtcgcgctgggatgagggcattccgggcctgctgtttgactataacgttaacggccagactcagcgccaggagcggagcggtgggcagagtaacagcctgagcggcaacggtaccgccggcgccaacgtcggtgcctggcgattgcgcgctgactggcaggggcagctcaatcaccaaaccggcagcggccagggtaccgatcagcggctggactggagccgttactatgcctatcgggccgtttctgcgctgcgctcgcgcttgacgctgggtgaggactacctcaactccggcctgttcgacagcttccgtttcaccggcgttagcctggtgtctgacgacaacatgttgccgccgaacctgcgcggctatgccccggaagtggtcggggtggcgaaaaccaacgccaaagtcaccatcagccagcaggggcgggtgatttatgagactcaggtggcggcggggccgttccgcatccaggatatcagcgaggcggtctccggtgagttggacgtgcgggtggaggagcaagacggcagcgtgcaggcgttcaagatgaacaccgccagcattccatacctgacgcgccccggttcctggcgcttcaaaatggcggcgggcaaaccttcagactggcagcatcgcagcaatgggccgctgttcggcaccggcgagttttcctggggggtgagcaacggttggtcgctgtacggcggcggcctgttcggcggcgactacaacgcggcttcgttgggtatcggccgcgatctgatggcgctgggcgcgctgtcgttcgacgccacccagtcgcgggcgcggttgccgcagcaggacggcacgctgagcggcggttcataccgcctgagctattcgaagaccttcgacgagaccgacagccaggtgaccttcgccggctaccgcttctcggagcaggactttatgagcatgagcgagtatctggacgcgcgctactacggcggccgggtgggcaacaacaaggagatgtacaccatcacctttaaccagcagttccgggatatcggcctgagcctgtacctgaactatgaccaccagacctattgggatcggccggctaatgatcgttacaacctgacgctgtcgcgctatttcgatatcggccgcttccgtaacctgagcctgtcgttgaccggttaccgcaacaagtacgaaaacaccaacgacgacggcatgtacctgtcgctgtcgctgccgtggggacagagcgccaacctgagctacagcgcgacggtaaaccgtcacgataatagccaacgggtggggtattacgaccggctggatgagcacaacaactatcagctgaacatcggtagcgccagaaacggcgccagcttcagcggctattacaaccgtgagggcgatatggcccagttgagtgccaacgccagctatcagcagggcagctacagcgcgctgggcttcagcgcgcagggcggtgcgaccttaacggcagaaggcggagcgctgcaccgcatcggcatgccgggcagtacccggctgctgctggataccggcggcgtggccggggtgccggtgcgtggttacggcagcaccgtagataccaaccgctggggcaaggcggtggtgacagacgttaacagttactaccgcaacaaggccagcatcgatctgaacaagctgggagaaaacgccgaggctaccaaatcggtggtgcaggccaccctgaccgaaggggcaatcggctatcgcaagtttgatgtgatcgccggggagaaggcgatggcggttatccggctggcggacggcagcacgccgccgttcggcgccacggtgatgaacgccagcaaacaggatacagggattgtgaacgacggcggcagcgtctacctgagcggcatccggccaggtgaaagcatgaccgtgcactggaacggcgcggcgcagtgcgccatcagcctgccgcaagcgttgccggctgacatgatgagcaacctgctgctgccgtgccgggcgctgccggccaatgagccagaggcgtaatgaacgcgaacaccctatttgaatctgtaagagtgataaacgtatgaaaaagaactttaccatgagcaaacatcaattgctgaccgccgcgctgttggccgcgctgctggcgccgcaggcgcaggccgctatcgcgctggatcgcacccgggtgatcttcgacggcagcgaaaagtccgtcagcctgaacatcagcaaccagaacaagcagttgccgtacctggcgcagggctggctggaggacgaaaagggcaacaagattcagagccctctggccgtgttgccgccggtgcagcgcgtggagccgggcaagccgagccaggtgaagatccaggcgctgccggcgaccaaacagctgccgcaggacagggagtcgctctactacttcaacctgcgtgagatcccgccgaagagcgacaagccgaacacgctgcagattgcgctgcagacgcgcatcaagctgttctatcgcccggcggcgattgcaccgcagcagaatgccgcgccatggcaagagcaactgacgctgagcaagcagggcgacaagtatgtggtgaataatccgacgccttattacgtcactttggtggacgcaggggccaggaaaggcgtggctggcgtgcaaggtttcgagccgttgatggtgccgccgaagagcagtgcgccgctcggcgtcaacgccagcgcgttgggtaacggcccggtgttgacctatatcaacgactacggcggtcgcccgcagctgacatttaactgcagcggcagcgcctgccaggtcgtgccggaaaagagcaagtcgtaacaccatcggctgtggcgggtcatcgggaggaataaagatgcaatggatgagcgagaaactgagaaaacacctgccgaagcgtcacgactgtcggtattacggcaccttgggcgggctggcgctgatggtgcccctcaccctcggggcgatgctgtggctgatgccggctgcgcaagggcaggtggcggataactggtacaccgacggcgccaatggcgtgctgcaggtgcgcggcgcgctgacggagagcgcctgtcggctggagatggaaagcgcgtggcaggttatcagcctgggggagatcggcaccgggcgcctgcagaatattggtgaccgcggcgtgccggtagcctttgagttacggctgagagactgcctgcgcagcccggccggcagccgggattcacgcaccggcgccttaacctgggccaatgatcaaccggcggtaacggtcactttccgcgccgggcaggatgcggataatccgcagctggtcagggctcagggcgttgccgggttgggattgcgtcttaccgacagccgtggacaggatgtgcggctgggcagccgcggggaaccgctgctgctgacgccggggcagaataccttgagctatagcgtggcgccggaacgcacggcggcccgtctggcggccggagcctatcgtgccacggtggattttagcctgagctatgactaaggagttgagaagtatggcgcacatattcagcccggccggtagttgcagcctttggcgcaatgcggcgatgtgtcttctctgtgtgggaatgtcaccattggccaatgcggcgaccactgtgacggtcagcgtcaccgtactggaaacaccgtcttgcgtgattaacgacaataaaaccatcgaagtggacttcggcgagatcctgacggtcaaggtggatggcaacaattataagaaatcggttgattatacgctgaaatgttcgggcattaagtccaatgccatgcagatgaaaattcaaggcggtgcgaccgcgttcgatgcttccgcgctgcggactaatatcagcgacttcggggtggcatttcgttctgatgggaagccattgcccattaatagctggctgaagttcacctactcgggtagtcaggctccgccattagaggctgttccggtaaaaagagcgaatgcgaagctgcccggcggtgactttactgccggcgccaccctgctgctagcctatcaatagaggagaggcaacgatgaaaaagcttggcatagtttgcctcatcctattgggtatcactgctcgagaggggatagcagtggaaaacatgagtttcaaagggacgctacgcgaggatgtgccctgtgagctcaatgatgggcaaccgataaacgtggattttgaaacggtgggcgttaataaaatcgatggggagcgttacaagaagtcgttttcggtgaaggtgagttgcccggcggaattcgatgttgcctataagatttactatgtcggtcaacccagtagttttgatacggcggcgttggccactaacgtcaaggggttggggattaaggcgcagtggcaaaaaaatggcgcttttgttgatcttggcgtcggcggtgcgattaacggtctggctgatatggatcttaatttccaggtggtgcctgtccggaaagtgaatacggagctggtgccgggtgcgttcaatgcctccgcatcgttcctgcttaaatatgagtgagctcgcagttgttaactgcgcgaggggaaatgacgagaaagagagcaagatgcttatgccggtgtgactacagttgcctgaaattgatattcacggtagctgactcatgcctcgtattcttaataggttcagtgagcgagactcaatataatggttaacacgttagccagatcaaatgtagtaagaagtttttttatattactgctcttatatacttcaggcgcgtgggcggggtggagtgctgacattcgatattcccccagagaaaaacagtattttgccaaagtcacttactgggatactggtgatgtcacgccgaatccaatgtatggttgttcttatctatgtagtgtcaccttttgggtagtagccgctgggacgacgggttctcccatgaacgaagtgagtttcccaggactcacgaccagcaagaccatgggggaactggcgcaaagctttgctaattcaggattctttaatagggagttctatagtcgacaaggctttcctgacaaaaatgtatgtgtcttttttggctattgggggaggtaccccggaggggcttatggccctgctcgttttcctggggggatgcaatgcgttccgccggtgattgatcccacctattgtgacctggcggaaaaagagattgagctgcgtcatggcgtgctgcgcgacgaggaggtgaatggtcagactgttagcacctcgctgcatgtgacgtgcagttccaaatatccggtgcgaattatgtcggcagacagagtcggcagcgtttactttaatggtgggaaacagttccggagtgaactgaaaatagatggcaaggatttaggtgaagggaaagttgttgaggcaacgccccaaggggtaacgctgaccttaagttccacgctgatgggatatgatggcagtattggggtgtttcagggctctaaaacgatcattgtttctttaccttaatcggtatgggtatttccagcgtgattttcataaaaaacagcagcactaatatttctatagtggagtttaaaggtgttgcttatcttgccacacaaggcgcggctataaatacgttaggtgtccataggctagaatattttggagaccgataggtaacgagatatctctacctctgtgccgcgtcgtcatcgcggtactgcgtgacgacctggtgaacagatatatgtggcgaagcaacagtgtgcttgtaaatctgagaatggcatttgcgagtagtaatgtttccgattttttaattaattgcctggcgaatcggacaaatatatgactggtgatgggcatctgtgacggagggtatcactccatcttgattatgactgtgcacatcgcggatataagcgtttctatactatatcaaccaggaggaagggatgaaaaagacagcgttagcgatggcattgctgtgtatgagccataccggttggggggccccgcctacggtggcggttaactaccgtggtgagctggtggcggagccctgcgtgattccccctggagaggaaaatatcgagctggattttggcacggtgattgataaatatctttatctcaatcagcgtacggcggggaaagcgttttctctacagctgacggaatgcgatctcagccttggcgaaacggtaagcgtttccttcagcggtacggaaagcgctgcgctgccggggttgctggctatcagtagcggtggtgcgagcggcatcgccattggcctggagaatgtttcaggtgagctattacccttgaatcagccttcggggaaactgcgactacaggaaggaagcaatagaattacgcttaaagcttatgtgcgtggtgaacctgaggctattaaaaacaaaagtatcgccagaggagaatttgtcagtacggctacatttttacttgattacgaataatagactgtaagcgatacgagtagaataaatatcgtagtatatccggtggaaaactttaaaacaggccgagcagaataccaattttgtacggaataaaattatcttggccgacaagaggtgttacatgggaacatttaatatcgtaatagatgatgagaatcgctattttgctgaggggcttcgactcagtattgaaaagtatgcgcagaatcgcaataaatccgtcaattttttatcaccggacggtgaggggcataccgacatggttgttgcttcttcactgcggcgtgcgcaacgctggcgcagggcgaatctttcaggcgcaccgtttatccttaccgttaaggaacggcctgttttagctgcgaggggtatctctggcgtgctgtaccgaacagataatcagaacaagctgtttgagttattgtctgaagcattgtcctgttctgcgttcccggctaccgctaagcggcaaatcttaaccggcagagagcggcaggtggttggttatcttcgtaatggattcgatcaatcccatactgctaggttgctggggttaagcgtcaagacgattcatagccataaacgctcgataatgagaaagttaatgttaactcggcatcatgagtttatttattggttattgcttcatggtgatgaatatactgaaagttgatatatttcattcctgttttccatccgcggctctttctatttgtggttgggcattgggaaatagtaccgagctgagatatcttgttaataaccgcatgaggtggttggtttttgatattggagcacgatgatgttgaagggacgaattaagttgcgatttatattagccttgaaagtgggagccttgctcttttttccaatcagcgctatagctgattggaaaacggcggcagaagtggaaattataccccccaactcaccagggcagggaccggctgttcagggaatctggcacgtttatattaaccaatgggataccaatgatctcaggcctaaccctatgtacggctgtaacagctgtgctctccatctgcggtataggttgccttggtggggatcaggtcatgatgctcaggtatttgccgacacaggaggctggcttagcaacagcaagacgcttggcgaagtggctctgggggctcaacaacaggggctggtcggaccgaatgcgactcgatatcttgttagatcagtgagtggttgggggctgtgtgcctacttagcgtactctgaccatgctgtgattaaaggcactattcttggtggtgccatagatgcgaatcgctatccggcttgcgaggcgcctgtagtgcaccctactcaatgtaatattcgtgagccccaggtagatattcgacatgggttggttgcaccagacaaagttaacggcagtcaggcttcggcacagattaccgtttggtgcaatgaaactttgccggtgcgtattgtcgcggcagaagcgaatgccactgactttattagcctgagtaaagccagtaactttcgtagcatcgtaacgatcaacgggagtcccttctcgaaaggtgcctttattgatgccgggtcggccggtacgaaagttaatttgacctcaacgctggctaattactctggtgaagtgggtgattttcaagggagcgctacaattgtggtatccattcaatgaaaaagtgatcttaatgctttactaggttacagaaggtatcctgaatggaagagtattcctaaccttgattagggatggtctattgcttatttgttgttaccctagttctctctgttgtttcaagcttgaattagaccgctacacggcagtgggcgagtctgctggggatttgctaataatttcttatcgataagcaggaatgagtcctgcttttttggctcataacgcgctatggcttatgagttatgaaaaactatttatcaagtgaatattatattttgtgtggtgccgaggtgtacccagggaaggtaaagtggatcttttttatctggcgatttttttgttttttctgagtttatatgcgtttttcaaacacgatcagcgtatgaagaaaaggcgattggcgataggtggaagagggcattagccgcaacaggaaaccggtacagggtctgccgcacagggaaataaatacaaacgggtaattcaataaacaaggagaaggacatgatgagaagaaaaatcgcattactgggttgcacactgctgatgtgttcgcagctggctcaggccaagctggtgattgaaggtggtcttaatggcaatatcggcagcggcaacggtgcttcagttgacgtcagcattaacggcagcactaacggcaacaacggcaacaacggcaccggtgtaaacgttggcggttcgcaaaagccggattctagcgccagccaactgcaaaaagacatttacgcgtcaatttgcgccagcccgtttatgaagaaatacgcttcgatttgtcagtaaggatgtatgtaattaagcccgccacgactatggtgggctttttcttcgttttgcccgccataggtatctcaatcttgccgttcaggcttgatgtaggcaatgccttgttcgtcatacagagtgtaaatcatccgcaacagtgtcctgatatcttcagattcatccaactgtcgggtgctcatgatgatcggggaaaccaggcgccgttcgttcaatatgttgtagaccacgtccgggcgcttcaggctgtgcaggcagtgaggaaccaacgcgatgccttcaccagcggctaccagccccaatgcgacctgcagttcccgcacctccatgatttttctggggactaacacacgatcgcgaaaggtcgccagcacctgatcggcaaagcttgggcgcggcgtttgcgggtaaacgatcagcgtttccgcctgtagggcgcgcagcgttaatccctccgaacgagccagcgggtgatcggccgctaaggccgccatcagaggctcttctcgcaggataatgcggcgtatatgcatgtcttcatggcgaatgcgaccgaatcctacatcaattttcccttccttgagcgctcgaatctgttccagagtggtcatttcatgcaggttcagacctacttcggggtgagcggtgcggaaacggcgaatcagctgcggcaggatgtcatagagcgttgaggcgacaaaaccgagcgacagcgggcgctctacttgccccacgcgctgggtcatggtcttcaattcgagactttgcgccaggaattgcagtgcgtgcccatagagaaagcgcccggccgcggtcagcaccagaggacgggcgccgcgtttaaacagcctcacccccaggctcgcctccaactgctgaatttgccggctgagcggcggttggctgatatgcagccgctcagccgctcggctgaaattctgctcttccgcgacggcgataaaatagcgtaaatgacgcagctccaagattatgcctttaaggtatcaatacgatgcaaaatgggtgttagacgagcgcgcccatgagcgatatcgtcgcgaatgaaaataaaatatgtattggccactcatcataggtggtttttaatttttattaaagaataagttttttagctaaatccaactcgtctatataagtgaaatacataagctcaacctattattggtggtttgctctgatatttatggttggtgccgatttcatttccgggaggacatatgtcgcaagctaatatttatgtcgtggatatcaatccaataatagataatgcgaaactgaataatatgcaccgactcacggtgttatggtgcgcttttattattgtttttgacggtttcgatcttgcagtactgggtgtggtccttcctgaactcatggcgaactggggcatcactgcggctcaggcgggcctgcagggcagttataccttagtaggcatgatgctcggcgcgattttattgggtccgctctcagataaaataggcaggaagaaaaccattagtttgtgtattatcacctttagcttatttacttttctttgcggctttagcgttaatgctggccaattcggctggtgtcgttttatcgccggcatggggctgggaggcgttatgcccagcgttacggccctcaccagcgaatattcacctaaaagtaagcggagcctgatggttgggctgatgtttagtggttattccatcggcggcatgctcgcggcgctgtcaggcatttatttgatcccggtcgcggggtggcaatctatattttatattgccgctttgccactcattgttttgccatggatgttaagccacctgcccgaatcggcggcatttttagtgaaaaccgaacagcatgaccgtttaaaacgccttttggaaaagattgcgccagactatatccatcaacccggtacgaagtttatcagctcttcctcggcaggtataaaagcgggaaaggcgaccctgaaggatctgttcgctgaacgcagaggcttaagtacgttgatgttctggctggttttcttcatgtcgctgtttgtcatctacggcatgacctcctggttgcctaagttgatgttgcaggctggctatccattaggctccagcctgtcgttcctgtttgcgctgcatctgggcaccattgtcggggcgttgagcagttgctggctgatggaccgaatgaatggaagacgtattcttattgggtattttttgctgggcgccgccactttagtgttgttgggtactcagacgccggtgtacatcctgtatttgctgctgattattgcaggtgcaagcaccattggtacgcaaatcgcgatgagttcttatgtcgcccgtttttatcctggaaccatgacttcgacgggccttggctggggcctgggcattggccgtattggcgcgattctggggcccttcatggggggtctgttgattgatagtgaattgacgcttcagcaaaactttatggctttcgcgctgccgtcgctgctggcagccgtctgcctgcttttcgtcaatccgcgcctggccgtttcctgaacttcactcttccttggcgtagagatacaccgaagcgcgggaaacgccgaggtgctgcgccacaatctccatcgcctttttcacctcgagcaggccttgctccctcagttcctgaatcaaccgctttctctccggcgttttcagcgcgcgcggcgtggtggcgtggcgtgcggcgaagcgatcgatacggttgcggatggcctccgcgccgctgggctccaggtgttccgtcaccgcgccggccgccgtttgcgtgaactgcgccagcgcgttttgcatgccgcggaacagcgtcatatcaacgttcaaacagagtgcggcgacgtagtcgccctgcgcattcttgatgccgatcgaggtgcttttcgccgggcggccatcggcgaactggttgccgtagttggcgatcacgctgggaaactccgccgaagcgatgcgagccaggccaagttccgtcgccgcttggccgacttctcgtccggacaggttgttgtggatcgccaaaatggcgtgttcgggattttgcagatcgtgaaccaccacctcgcaaaacggcgcgaaggtggcgctcagcccctcggcaatcacattcaactgggataacaacaggttttccggcacttcaggcatagggcactccgatcactttcttggcggcgttggctcatttcgagccagatgaagaacataccacaagtgcggcgcacggcggttttcatctggcgcctggcggcactaaaaatgatcttgctcccaattctgcacttcccgattggcatttggccgtcgcgcaggtatataacatcatttctggacttattttctaattttagattatttgttttaaatatgacaatgttcgtgcgttaaaagccgtatcgcacacaccggggtttttcagcgctagcttcaacggcccgcaagggcatggagaacaataatgtctgcaacttcagtcgtcggttctgcacgaaaacctttttattacacgttgacctttcagttggtggtagggctggcggccggtagcgcgctgggcctgttgtggccgcaaatcggcgctcagctcaatccgctggcggcggccttcgtcaaactgatcaaaatggtggccggcctgattgtgtttctcaccgtggtagccggttttgcgcaggttaaacgcggtgccggcgttggccgcctgggcatgatctcggtctgttatttcgaagtggtcagcacgttggcgctgctgatcggcctggcgatgggcaatctgtttgagccgggcaaggggctggtcttgcatgccgatgccgccacggcgcttaaaccggcggagcccctgcaaggcatggatttcgtgatgagcatcatcccgaaaacggtggttgatgcgttggccggcggcatcatgctgcaaatcttgttggtggctctgctgtttggctatgcgctgtacgcgatgggcgataaaagcaagccggtggttgatttggtgaatctgctgaccgacgccaccttcaaagtggtcaatatcatcctcaagctggcgcccgttggcgtatttggcgcggcggcgttcatgctgggcaaatacggcatcggcgcgctgatgccggtgatgaaattggtggggctggtctatctggggtgtctgttcctcattgtggtggtgttttccgtggtggcctggttgacccgttttagcctgttcagtttcttaaaactcatcagggaagagctgatcatcgcctttaccaccacctcatcggaagccgccttgcctggcctgatgaaaaaacttgaatcggtcggctgcagtaaagccaccgtcggttttgtcgtgccgaccggctactccttgaatctggacggctcttcaatctacatgacgttagcggcgctgtttatcgctcaggccgccggtttggagctgagcctggcgcaacaggccggtctattgatggtgtttctgttgacctcgaaaggcgtagccggcgtgacgggcggcgctttcgtcacgctgtccgcttcgctgttgatgtttccagagataccgatggaggggctggcgctgattctcggcgtggatcgcttgatggataccatgcgtacgttgaccaacgtggccggcaacggcgtggcgaccatggcgatttcttactggcagaaagagcgtgtgggttttcaggcgaggctgcctgaagcggctgcgcgcaaacccgtctgaatgccgccctgcgccgtttccgcagggcttttcgaacctgtgcaaggattaaatatgaagcatgatgtggtttacaacgccgccggcggctttcctcccgccggtcattattcgcccagctgtacggccaatgggacggtctatatctctggtcaattgccgatcgccttttccggtgagagtcttgccgacgaacctttcgcgcggcaagcccgccaggtgctggccaatctggatgcctgcctggcaggggccggcgtcggccgcgcgcagctggttcaggtgcgcgtctatctgacggatatcgatttgtggccgaccttcaatgcgctgtatgccgaatggatcggcgagtttcgccctgcgcgcgcggtggccggcgtatcgcaactgcattatggcgccgccgtggaagtggaagctgtcgcgttggccgccctttaacccttactgacaggtaacgctatgaccgatttgattttacccgtttatgacgacgtggccgccgccgccgcgcgcatcaatgattatactcaccgcacgccggtgcagacttcacgcacggttgacgacgatttcggcgccagcatatttttcaaatgcgagaacctgcagcgcatgggcgcctttaaatttcgcggtgcgatgaatgctttgctgcagttttctccggcgcagcgcaaggccggggtcgtggccttttcttccggcaatcatgcgcaggcgatcgcgctggctgcccggctgctcgacattcccgccacgatcgtcatgccgcacgacgcgccggcggccaaagtggctgcgacgcgcggctatggcggcaaagtggtggagtacaaccgttatcatgaagatcgcgagcagatcggccgggatctggcgcagcaacagggattaacgctgatcccgccttacgatcatccgcaggtgatcgccgggcagggcaccgcagctaaagagctgttcgacgaggttggcgaactggacgcgctgttcgtttgtctgggcggcggcgggttgctggccggttctgcgcttgccgggcgccggctgtcgccgggttgccgagtctatggcgtagagcctttggcgggcaatgacgggcagcaatcattccgtaccggccgcatcgttcacattgagacgccgcagaccctcgccgatggcgcgcagacgcagcacctgggccaatatactttccctattatccgccgggacgttgacgacattctgacggtgaccgacgatgagctgattagcgccatgcgctttttcgccgaacgaatgaaaatggtggtggagccaaccggctgcctgggattcgccgccgcctgcgcgcataaatcgatgctgcggggaaaacgcgtcggtgtgatcatcagcggtggcaacgtcgacattcgccgctacggcgagttgctggcaggtcaatagaaacaggcgggtgacgagagagaaccatggtgacagacaagacagtatttgagcaggtcatggcgctgctgagcgccggagaggccgcattccgggtgatagaacatccggcggaggggcgctgcgaagcggtggcggcgctgcgcggcaccgaacaggggcagggcgccaaggcactggtctgccaaacgcgcatcgacggcgccaagcattacattttggcggtgctggcggcggaccgtcaggcggatctgcagcggttggcggccgagttgggcggtaaaaaggcatcgttggtcagcccggcggaaatcacgaccctgacggcctgcgtgccgggggcgatcccgccgttcagcttccacccgcagctcaggctggtcgccgatccggagctgtttgaccgttacgatgaaattgcgtttaacgccggcgatctgcaacgctccgtggtgctcaatgcgcaggattatctgcgtattgcggcgcctgagtttattcattttgcgcgtacggagacaatgacggagtgagaaaaagatcgtctgttcggacgagttgaacaacaacgctgaaccgccgtttaccgccggttcagcgttgttatgctatatcctttgttcggaaccgctggctgaacgagagactgagtttgatcaccaatcccctatcccgcaaagaatacgcagtatggatgtcgttaacgatagggttcagctttgcgtggctaaatcttttagagatttataatcgtgatacgttattttttcagaagttgacgatttccgtcatcaataacgtatcgttcgccgatgtcatcgccccttacctgaggctgattctgtatcttcctttcggcgtgttggcgatcgtgctgacgctgctgttttgcgcccagcggttatgcgatacccggttcttcgtgctcgcctggccggtttctctggcgatcttcctggccttttggtttatcaacgtcgctttccccgggcatctcaatctggtattagccgccaaatcctgtgtgctggcgctgattgggctgatcccaccgaggaagcggaagaccgaataatcgaacgcagttcgatggagagtccgtatcccagaaagcgaaaaacccgccataggcgggttcttctgaatatggtgcccggactcggacaaccggcgctggcgccgcgttgaacagcgcttcagcgctggcccgcagggtgaggcctctggccgaataatcgaacgcagttcgatggagagtccgtaccccagaaagcgaaaaacccagccataggctgggttctctaaatatggtgcccggactcggaatcgaaccaaggacacggggattttcaatcccctgctctaccgactgagctatccgggcaacgggcagcattaaaccgtattggccgaaagccgtcaacggctttatgcgtgaaatacgcgaaaatgcctccggttgctggcttttcaggcaaagggcgcaaaaaatgcgcctgttggggctatcgcctcgggttggtggcgctgccaaccctgccggttcagctcaacgccccgttgcggcggcactgcgccacctgcaagatgtcttccgccagccgtttggcgaccgatacgtcctggagctggcgttttaccagcagtttgctcaggcagccttcctgaatcagctccatttgctgcgccaccatgtcggcgtcgtcggcatccatgtcgcgcagcagttcgcgggtcagctccagcgaggtcagcttttgctgctccgccagctggtggatcgggtggtccgtttccgggaagaagctgcaggcggcgataaacaggcagccgggatagcggtcttgctgcacgtattccgccagcacgtcatagcgcgccagcagcttttgctgcgggctcagattttcgtccagcagcagctggcggcgccaggtgtcgatctgttggccgtggtagcgcaggcagtcgtacagcagcgcttcgcgatccggccagaaccgtttgagatcgccgggctgaacgtcgagtttttccgccagcatctctaatgtggcggtcgccaggccctgttgttccaacaggcccagcgcggtatcaaggacgtgttcacgttgcacttgtgcttcctcccattcacttccgatcttcagtgtcagttatcgcatcactttctgcaaatgcgcgttgaaggcttccgccttcataaaaccggtgacccgctgcgccgtcagttcctggcccgccggatcgaagaacaggatcgtcggcagccccagcacctgcagatgcttcagcagcgccgcctgttccgcgctgttggcggtcacatccgcctgcagcagcaccgcgttggccaggctcgcctgcaccgccgcatcgctgaaggtgtatttctcgaattctttacaggctacgcaccagtcggcgtacagatccagcatcaccggcttgccgcgcgcctgttgcagcgccagatcgagctgtgcgacgttgttgatgcgggtaaaggccaggtgtggctgagcggcctgctgcgcctggtcggcgccgaaagcccagtcctgcagcggccgtgcggcgatcaccgccgccgccagcagcagcagttgcagggcgcgagcccagccgcgcgcgcttctcaggctcagggcgaaggcccaaccgaagaacgccaggccgagcaggctccacaggcgcatgccccacagatcgccgatcactcgctccagcaggaacaccggcagcgccagaatgacgaagccgaaggcctctttcacgtactgcatccacgggccgctgcgcggcagcaggcggttgccgaacagggtgacgatcaccagcggaatgcccatccccagcgcgtacaggtatagcgtgccgccgccggcccacagattgccgctctgggcgatatacagcaggatggcgctgagcggcgcggtggtgcagggcgagcaaatcagcccggccagggcgcccatcaggaacacgccggtcagcgagccgccgcgctgggtgttgctccagttagccagccgggtttgcagtgcggaaggcagctgcagggaatagaggccgaacatcgacagcgccagggcgatgaacagcaccgacaggccgatcaagacataaggatgctgcagcgccgcctggaactgcagcccggcggcggccaccaccaacccgagcagggtgtaggtgagcgccatgccctgcacgtaaaccaccgccagcgccagaatgcggccgctgctttgcggccggtcacggccgagaatgatgccggagatcagcgggtacatcggcagcacgcacggcgtgaaggcgatgccgatgccgatcagcaatgcccacagcggcgagaacggcaggctggccggtgttgcggattgttcggctggctcagaggcagccgccgggagcggcgcggcagcgccggcgctgaccgcgtccagcgggatgacccgggtttccggcggatagcagaagccggcctcggcgcagccctgataggtgacgctgaggctggcgttggccgccgcctgttgcagcggcacctgcagattcagctgctgtttgaaaatcgccacttcgccgaagaactcgtccttgtggcttagcccttcgggcagggtaaacgcgccgagcgttgcctgctggggcaccagtttgatctgctgacgatacaggtaatagccggggcggatctgccagttcagcgttacctggttgccttgctgtttgaaatcgaaagcgaaggcccgatcgacgggcacgaactggctgccgcccgtcggtgcgaacagtgaagcctgcgccgcctgcggcaggaagaacaggctgcacagcagcaaaatcagtttaatgaagcgttgatccatgacaggtagtctttatctccggccatcaccggcaataccagcagctcgggtgtctggtaggggtgatgttgtttcagggtgtcgagcagggcctgctgacggcggcgatcgcttttgaacagcatctgcacctcgtattcctgttccagtttcccttcccagtaatacagcgaggtggcgccgggcagcagcgtggcgcaggccgccagcttatcgcccaagacccgcgccgccagttcctgggcgctggcttcatcgggtgcggtacagagtatgacgacagcttcgcaatcagacatcttcagccctctcatcggttcgaatgggcactataccctgaaggcggattggctagaaggcgagtttatcgccagaaggaaaaccggggccgaagccccggtcgaagcgttacagcatgacgctgccgagcaggaagccgaataccaccgcgaagatcacgcccatggtgccgggaatgaagaacggatggttgaacacgaagcggccgatgcgcgtggtgccggtatcgtccatctgcaccgcggcgaccagcgtcgggtaggtcggcaggatgaacaggccggaaacggcggcgaaggaggcgacggcggtcagcggcgacacgttcagcgccagcgccatcggcatcagcgccttggcggtggcggcctgcgagtacagcagcgccgagcagaagaagaagatcaccgccagcagccacgggtgcgcctgaatgacgctgccggccgtctctttgatccaatcgatgttggcctgcacgaaggtgtcgcccagccaggcgacgccgaggatacagatacaggcgctcatgccggccttgaaggtgctggagttcagcaccatgtcggtgtcgacgcggcacagcagggtggtcagcgtggcgacgctcagcatgatgatcaggatggcgttggtggtgttcatcagcggcttggccaccaggcccaggcccgggctgttgatgatggcgtaggcgaccacgcacagcacgcccagcaggaacagcagcaccgaggctttggcgcgcggtttgatcgccagcgcgttgttgccgcgcagggtgatcaggccttcttccaggcgtttcaggtagaccggatcgttagacagcttggagtcgaacagccaggtcaccagcagcgacatcaccagcacggcgcagaaggtggacgggatcaccaccatcagcaggtgcaggtagctgacgccgtggccttccatcaccgaagacatgtacaccaccgcggcggaaatcggcgaggcggtgatggcgatctgggcggagaccacggcggtcgacagcggccggcaaggcttgatgccctgttctttcgccacttcggcgatcactggcagcgccgagagcgagatgttgccggtgccggcgaagatggtcaggaagtaggtgacgataggggcgagaatggtgatatgtttggggttcttgcgcagcagcttttcggtctgctgcaccaggtagtccatccccccggcgacctgcatggcggagatcgccgcgatcaccgccatgatgatggaaatcacgtcgaaagggatgctgcccggcttgacgccgatcagcgccaggaccagaacgcccaacccccccgcgaacccgataccgataccgcccaacctggcccctaaaaagatggccagcagaacgataaccaattccaaggctagcatagtgtttactccttaaaatgagatttcccgtcatccttgaaactgcatcggtgttggctgcgagcactcaccccagtcacttacttgagtaagctcctggggacttgcgctcttgccgccttgatgcagtcccaatgatttagggtgtaaattgaaaataaaacgttaaaattttgtgggcgcctaaaagtaaaaaggcacgctatccagaggatttagcgtgcctttcagggctaccgggtaggtctgttattgttcattttcatccgtatagcgtttggctttataggccgggtgcatcaggttctccacggagaagatgtcatccagctcggcttcggtcagcaggccgcgttccagcaccacttcgcgcacgctcttgccggtttcggcgcagatcttcccgacgatgtcaccgttatggtggccgatgaacgggttcagataggtgacgataccgatcgagttgaagacgtagtgttcgcagacttctttattcgcggtgatgccgttaatgcatttttccagcaggttgtagcaggcgttggtcaggatgtggatcgactcgaacatcgcctggccgatcaccggctccatcacgttcaactgcagctggcccgcttcggccgccatggtaacgcaagtgtcgttgccaatcaccttgaaacacacctgattgaccacttccggcaccaccgggttcactttggccggcatgatggacgatcccgcttgcagctccggcaggttgatttcgttcaggccggcgcgcgggccggaggagagcaggcgcaggtcgttacagattttggacagtttcaccgccaggcgtttgagcgcgctgtgcaccatcacgtaggcgccgcagtcggaggtggcttcgatcaggtcttccgccggcaccaccggcaggccgctgacttccgccagtttttgcaccgccagcggctggtagccttccggggtgttgagcgcggtgccgatggcggtggcgcccaggttcacttccagcagcagctccgcggtgcggtgcaggttgcgggtctcttcgttcagcagcacgctgaaggcgtggaattcctggccgagggtcatcggcaccgcgtcctgcagctgggtgcggcccattttcaggatggtttcgaactctttcgccttgcgatcgaagccttcgcgcagctggttgatggcgtcgatcagtttctggttggaggcgtacaccgcgatgcggaacccggtcgggtaggcgtcgttggtggactgacacttattgaggtgatcgttcgggttcaggtactggtattcgcctttttggtggcccatcagctccaggccaatgttcgccagcacttcgttggtgttcatgttcagcgaggtgcccgcgccgccctggaatacgtccaccgggaactgatccatgcacttgcctttatccagcacctcgtcgcaggcctggatgatcacgtcggcgattttgcgcggaatggttttgagttctttgttggccatcgccgcggcctttttcaccatcaccatgccgcgaacgaactcgggaacatcgctgattttgctgttgctgatgtagaagttttcaatcgcacgcagagtgtgaactccgtagtaagcgtctgcggggacttcacgtgttcctaacaggtcttcttcgatacgaatgttgtttgacatgagaaccttctctatgtgttgctgccgaattaataatttgtcaggtcaaggctaaagggcacagcctaaattaatattgccgaaggcttggggcgtgaaacgattaaccaaatcgcccgttgctgcccagatcatatgctggttgataagaaatgactgaatccagatcaccttatggtgtttaaggatatgcccttttccggttctgtgacttctttcacgtttgtgaactttagcaataaaaaccggctctcggttgaaatggtggggggatgccctcattgtaatggtgtcggccgtttacggcctcttttttcgcgccgtcgccccgtggcggccgcgctttacctaccgataggagaaccaggtgcgctggttaccgctactgctgatatttctgctggcttacatagaaatatccatctttatcaaagtcgccgccgtgctcggcgtggctgtcaccctgttgctggtggtgttcagctcctgcgtcggcatttcgctggtgcgcaatcagggcatgaaaaccttcgtgcagatgcagcaaaaactggcggccggcgaaagcccggcggcggaaatggtgaaaagcgtttcgctggtgctggcgggcttcctgctgctgattccgggcttcttcaccgacttcctcggcctgctgctgctgctgccgccggtgcaaaaatcgctgacgctgaagctgatgccgcatctgtcggtgtatcgccccggcggttggacgggcggcgacgccgccaacggcaacacctttgacggcgaattccagcgtaaggacgacgagcgcccggtgctggaacaccgcccggacgaggatcgcaaacctcacgatcgttaagcaaacgcggcccaggccgcgtttttcatctctgcggcactcgccgaaccaaaaatgcgaaattttttttcgttagcccccttgaagggggctggaacgcccccatctcaaatgccacgaggccggtaataacaaccatccggtgtacaaccctaaatctgatagagaccttcttacaggagagcgttcaatgagtattcgtccattgcatgaccgcgttatcgtcaagcgcaaagaagttgaatcaaaatctgctggcggcatcgtcctgactggctctgctgcgggtaaatccactcgcggtgaagtggttgcagtgggtaaagggcgtgtgctggaaaacggcaacatccaaccgctggatgtgaaagttggcgatatcgtgattttcaacgacggctacggcgtgaaagcagagaagatcgacaatgaagaagtgttgatcatgtccgaaagcgacattctggcaattgttgaagcgtaattgcgctttatcttctgaactgaacgagttgaagggaaataccaatggcagctaaagacgtaaaattcggcaatgacgctcgcgtgaaaatgctccgcggcgtgaatgttctcgctgatgcagtaaaagtgaccctgggcccgaaaggccgcaacgtagtgctggataaatctttcggcgcaccgaccatcaccaaagacggcgtttccgttgcgcgtgaaatcgagctggaagacaagttcgagaacatgggcgcacagatggtgaaagaagtggcctccaaagcgaacgacgcggcgggcgacggcaccaccacggcaaccgtactggctcaatccatcatcaccgaaggcctgaaagcggttgctgccggcatgaacccgatggatctgaagcgcggcatcgacaaagcggttgtcgctgcggttgaagaactgaaaaaactgtccgtaccttgctccgattccaaagctatcgctcaggtaggcaccatctccgccaactccgacgaaaccgtgggtaaactgatcgcggaagcgatggagaaagtgggcaaagaaggcgttatcaccgttgaagaaggcaccggcctgcaagacgagctggacgtggttgaaggtatgcagttcgaccgcggttacctgtccccatacttcatcaacaagccggaaaccggttctgttgagctggaaagcccgttcatcctgctggctgacaagaagatctccaacatccgcgaaatgctgccggtgctggaagccgttgccaaagcaggcaaaccgctgctgatcatcgctgaagacgttgaaggtgaagcgctggcgaccctggtggtcaacaccatgcgcggcatcgtgaaagtggctgccgttaaggcgcctggcttcggcgaccgtcgtaaagccatgctgcaggacatcgcgaccctgactgccggtaccgttatctctgaagagatcggtctggagctggaaaaagccaccctggaagacctgggtcaggcgaaacgcgttgtcatcaacaaagacaccaccatcatcatcgatggcgtgggcgacgaagcgaccatccagggccgcgttgctcagatccgtcagcagatcgaagaagcgacctctgactacgatcgtgaaaaactgcaggagcgcgtagcgaaactggccggcggcgttgccgttatcaaggttggcgcagcgactgaagttgaaatgaaagagaagaaagcccgcgttgaagacgccctgcacgcaacccgcgctgcagtggaagaaggcgtggttgccggcggcggcgtcgcgctgatccgcgttgcaggcaaaatcgccgcgctgaaaggcgacaacgaagaccagaacgtgggtatcaaagttgcgctgcgcgcaatggaagcccctctgcgtcagatcgtggttaacgccggtgaagaagcttccgttatcgccaaccaggtgaaagcgggcgaaggcagctacggctacaacgcttactctgaagaatacggcgacatgatcgcgatgggtatcctggatccaaccaaagtgacccgttctgctctgcagtacgcggcttccgtggctggcctgatgatcaccaccgaatgcatggtcaccgacctgccgaaggctgacgcaccggatctgggcgcagcaggcggcatgggcggcatgggcggtatgggcggcatgatgtaatcatccccccacacgcttgtgtgctgagaaccccggtcaaacgaccggggttttttttagcttaaaaatcaataaaaagaatgttttattagcttgttattagtttaatgaatgaataattgcattattttgtttttgccctaaaccgttgtcgtttcgtaccgatatagcccctaccgggcggggaattttcccccgccggggtgactgtcaacggagacgacttatgctgaaaaatatgaaaatagccacctggctgatgttgatgctgttgctgctgggcttgatgcccatgggaaccggcgccatcgccttctatttcatgcagcaaaacggcaacagcatcggcagaatgagcactttctccgacgaggaagcggcgctgaaccgcagctggcgtgctttgctgcaaacgcagacgctgatcgacaacatggcgttcgagcgtatggcgcagaccagcagagccgatattcagcagggcattgatgaggcgcgcggcgagctgcgcggcgccgatgtcgctttcaatctgttctgggatacgccgggcctgacggtatcgcgcccggagctgggtgaggcgatgaaaaaggtctacctggcgcagcagagagtgctgaagcaagagttgacgctgctggccgagacgccgcaggcatcgttgattgaacggctgcacgccatggcggccgagaagcgtcagatgcgccaacggttggacggccagtttgccgactacatgcgggccaccgtggccgcccaccgtctggcggtggaggaggcggaacagactcagaaagtgttcgcccgcctgctgagcggcaccctggcggcgatcctgctgctgctgctcgccgtacagcgtgatttccgccggcgcctgatcctgccgctgcgccagattgccgaacatttgcaaaaggttgggcgtggcgatctgcgtagcaagatcgtggcgcgcagcaacgatgagattggcatgctgttcgccagcctgcaggcgatgcagcaggagctgagcgccaccgtgcagcaggtgcgtgacggcgtggagtcgatcaaccacggcacgcatgagatcgccgtcggcaacgccgatctctccagccgcacagaagaacaggccagcgcgctgacggaaaccgccgccagcatggaacagatcaccgctacggtgcggcaaaacgccgataacgccaaccaggccgccgggatggtcaatcagaccgccggcattgcccgcaacggcgaaacgctgatggccagcgcggtcgacaagatgcgggcgatcaacgacagcgcgcgtcaggtgggggatattaccagcgtgatcgacggcatcgccttccagaccaacattctggcgctgaacgccgccgtcgaggccgcgcgcgccggggagcaggggcggggttttgcggtggtggccggcgaagtgcgcaatctggcgcagcgctgcgcgacttctgccaaggagatcagcagcctggtcgacggcgtcaccggcgatatcgccgccggcgtgcggctggtggaacaggcgggcgagacgatgaatgccatcgtcggctcggtgaaccaggtgacgtcgctgatggataacatctcgtacgcgtcgcaagagcaaagcaagggcgttgagcaggtcggggtggcggtgacccagatggatcaggtaacccagcagaatgccgcgctggtggaagaggtggcgaccaccgccgtcggcgtggaggagcaggcggccctgctggcgcaggcggtggcggtattccaactggcgggagagccggaagcgtcggcttcggcggccggtgccggctgggtataatgccgccgctctgtatttgatgatatttttgccgcccggggcgatttagctggtaaactggttagtcatcagctgtcgctcaagacgttggcccgctcgcgcggcaacggatgcttaagagatggcatcgctttctgatataccctatgaatttcaagttgtagctaggcggccagctcgtgagtccccaggcgcttacttgagtaagtaactggggggagcgagtgcagtcaacaacgctacagcttgaaaggcgacgggtagaagattttgcgtaattctcaacatcgaatggggaacaagatgcggattaaagccttactgggtctttcggcagcggtgctgctggcgggttgcagcaccactcatgaactgaccgctgcgggtcagcagatcaagttcaccgacagcaagccggcggcggaatgccagctgctgggggaagtgaccggcacccagagcaactggctgtccggcaacggcggtgagggcagctccatgcgcggtgcggccaacgatctgcgcaacaaggcggcggcaatgggcggcaacgtgatctacggcgccaacagcccaagccagaacctgctctccagcttcgcgccgctggacagcaaaatggtcggccaggtttacaagtgcccgtaaggcgctgaggccaaacgccgcacagagataaaaaaagaggaatgccacggcattcctcttttcgttccatcaggccatgtggcgcgcatcactcctgcatcaggcgcaggtcgatcggtgttttgctcggttcgccgcccacttcacgcgtcaggcgcggcaccagataaccggacaccttgctcagcagcgcctgcatgatgacgcgcgcttcatcgtcgctgaccatgaagtgcgccgcgccctgcaccttgtccagcacgtgaatgtagtagggcaggatgccggcgtcgaacagcgcgttgctgagcgcggccagcgtgtcggcgtcatcgttgacgtcgcgcagcagcacgctttgattgagcagcgtgacgccggcgaggcgcagctgagccatggcgctctgcagctcgcggtcgatttcgttggcgtggttgatatgcgtgaccatcagcacctgcaggcgcgaggccgacagcaggcggcacagcgccggcgtaatgcgcgccgggatcaccaccggcagacgggtgtgaatgcgcaggcgtttcaggtgcgggatggtctccagttcgccgaccagccactccagctcgctgtctttggccatcagcggatcgccgccggaaaaaatgatctcgtcgagttccgggtgttggcggatataatccagcgcctgccgccagttgttcttgttgccctgattatcctgataggggaagtggcggcggaagcagtaacggcagttgaccgcacagccgcctttgaccagcagcagcgcgcgattgcggtatttgtgcagcaggcccggcaccacgctgcgctgctcatcgagcggatcggtggtgaaccctggggcgttgatgaactcctctctggcggtcagcacctggcgcagcagcgggtcgttggcgtccccggggcgcatgcgcgcagcgaaggcgcgcggcacgcgcagggcaaacagccggcgggcatcgcgcccctgcggcagttccgggtgcgtattcagtgacaaaagctgcagtaattcatcgggatcggtaataacatcggcgagttgatgcaaccaatcttctctatgtgccgtactttgggttataatgtgtgccatttttttggctaagctaccagttcaaatattcagagggccatcatggcgacttattctagcaacgatttccgtccgggtcttaaaatcatgttcgagggcgaaccttacgccgtcgaagccagtgagttcgttaagccgggcaaaggccaggcgtttgcacgcgtgaaaatgcgccgtctgctgaccggcacccgcgtggaaaaaaccttcaagtctaccgattcttgcgaaggcgcagacgtgatggacaccaacatgaactacctgtacagcgacggtgagttctaccacttcatgcaccctgagtctttcgaacagcatcaggttgacggcaaaaccgtcggcgacgcggccaaatggctgcaggataacgcagagtgcatcatcaccctgtgggatggccgtccaatcgccgttcagccgccgaactttatcgaagcggaaatcaccgataccgatcctggcctgaaaggcgataccgcagggactggcggcaagccggcgaccctgagcaccggcgccgtggtaaaagtgccgttgttcgtccagatcggcgaagtgatcaaagttgacactcgctctggcgaatacgtctctcgcgttaagtaagtttcaaaacagaggaacccccgcggttcctctgttttatcccatcctcgttcgttggcagaaaatccgcatgttcaagaaaacgctgttggccgtgctctccctgttgttccttttctccctcagcagttgcaatacgtttcgcggtttcggcgaagacgttcagcatctcggcggcgccatctcccgcacggccagctgatcccgcctttaacccgatgtatttgcgccacaaagccggtcacgatcccacaccctccgtcaattttgactacgcttagaaagccgtactttttcatcaacgacaaataaggactttcttatgctgaagaaaagtattatcgcgatcttctctttgatgattttgagctcgctgaccgcctgcaataccacccgcggtgtgggtgaagacattcaggccggcggcaaggctattcagcgcagcgcggaataatccgcattccacccggcggcgttccggctgcggagagccgccacatttctatcccttgcctgagcgttaacgctgctgctatcctgccgcagtgcgggtgaggttacccgtcatgcatcacctcgctgaacgggacggctcgtttacgcgtcattttatcggggacgaccccagtggtagggaggccgtctcatggcctggattattctgcttatcgccggtttgctcgaagtggtttgggctatcggtctgaaatacacccacggttttacccggctgacgccgagcatcatcaccatcgccgcgatggtggtcagcatgttgctgttggccaacgccatgaaaacgctgcccgccggcaccgcctacgcggtgtggaccggcatcggcgcggtgggcgcggccatcatgggcatggtgctgttgggggaatcgaccaatatcgcgcgcatcatcagcctgtgcctgatcgtggtcggcatcctcgggctgaagttcagcagtcactgaccggcggactgctgcacccagatcagcttgtcggtggcgaaaccgtagcctttggctgtctgcaataagcggtcgcgcacggcggcgtcaagcgtcggcgtgcgcgacaggatccacagatagtcgcggttcgggccgcaaaccagcgcgtagcgatacgccggatccagggcaatcacgttgtagccgccgtagaaggggccgaagaacgatactttcagcgccgcgatctgcggtgaaccgataaagtaggctttgccttcgctttcttgccattgctgtttctgcggattgaagccgcgattgatgactttcagtccgccgtcggcacgcgggctgtagtgggcggtcacctgctgtaaaccgcgttcgaagcgatgatccagacgtgcaatctcataccaggtgccgagatagcgctggctgtcgaaaggggtcacgaccttgatgtctttaggcggggagacgctgcaggcgacggaaagcagggcggaaagcatgacgctaagctttgaccataaacgcatcggtgactcctgtttaccgggggcgagtagacagtgtagccgatgagaaaagggcggccaacgggcgttggccgcctgagcggtttacagcgtgacgacgccgatgacggtgacgacgctaaggatcgccgccagaccgtagaacacccacttgccggccggcacgtggatcttcagatcgtgcatcgcatggtggatgcggtgcaggccgcaccacagcggcagaatgatcatcattagcaggaacaggcggccgatcaggctctggcagaacgccagcacgcgctcgtaacccagcgcctcaccggggaacagccccagcggcagcagaatgccgaccagcagcacgatggccggtgcgacgatcgcgccccacatgccgccggcgccgaacaatccccagaaaaccggctcgtcggaacgtttaggtgcttgatttatcatgtttcctccggattagatcagggccacggccaggatgaccacgctgacgacgatggtgacggcccacagccctttcacgatggggcccggccccattttctcgctgttgaccacgatattggcggccttcggcgccagatcgaaccaggttttggtgtgcagcgccgccgccagcagggcgacgacgttgatcaacagcaccagcggattctgcaagaaactgacgaagccggcccagctctcggcgccgcccttcagcgcgaacacgccgtacagcagcacgatgctgaaccacaccgccagcaccgaggtgccttcgcgcagcatgtagaaacggtagaagccgagcttttgccaccaggtgggcgtcatggtgcgcacatagggcttacgttgagttgtcatggcaatttttctcccttattgcggcttcagcatggcgatcatgaagtctttggcgctctccaccttgccctgctggatggcggcggcgggatcgacgtgtttcgggcagacttcagagcaatagccgacgaaggtgcagctccagacgccgttttggccgttgagctgcggcatgcgctgtttcttgccgtggtcgcggttgtccaggttatagcggtgcgccagcgtgatcgccgccgggccgataaactcggggttgaggccgaactgcgggcacgcggcgtagcacaggccgcagttgatgcagccggagaactggtggtacttggccatctgcgccggggtctgcacgttcgggccatcctccggtttgcgatcgttgccgatgatgtacggtttgatcgcctccaggctttcgatgaagtgggtcatgtccaccaccagatcgcgctcgatcgggaagttgcccagcgcttcgaccttcatgccgccgacgtagtcgcgcaggaaggttttgcacgccagcttcggcacgcggttgaccatcatgccgcaggagccgcagatcgccatgcggcacgaccagcggtaggagagatccggcgccaggttatccttgatgtagcccagcgcgtcgagcagcgaggtctgttcatcataaggcacggcgtaagtgacgaaatgcggctcggcgtcactttccgggttatagcgcatgacgtcgatcttcagggtttgcatctcagccatttgcctgctccttattctttttctcctgcgcttcggcttctgcgccgtagacgcgtttggccggcggcagcttggtgattttcacgtcgctgtattcgagacgcggtgcgccctgcgggttgtggaacgccagcgtatgcttgaggaagttgacgtcgtcacgctcggtgcagccttcgtccaggcgctggtgggcgccgcgcgactctttgcggttaaatgcggagtgcgccatgcattcggcgacgtccaggccgtagcccagctcgatggtgtacagcagatcggtattgaacacgctggtgttgtcggtgattttgacgcgcttgaagcgctctttcagctcggccagcttatcgatggttttttgcatcagctccggcgtgcggtagatgccgcagccttcttccatcgacagccccatttcgtcgcggatcttcgcccagttttcgttgccttcctgcttcatcaggttgcccaggcgggtttcgacgtcgcgggtttgcgcatccagcgcggcgccgttggccggcgcggtttccagcgcgcggcgcgccgcgtgctcaccggcgacgcggccgaataccaccagttccgccagcgagttggagccgagacggttggcgccgtgcaggccgacggaggaacattcgccgaccgcgaacagccccttgatgcgagtttcgcagttctggtcggtttcaatgccgcccatggtgtagtgcgcggtagggcgcaccgggatcggatccttcaccggatcgacgccgacgtaggctttggccagttcacagatgaacggcagccgctccagcagctttttctcgcccaggtggcgcagatcgaggtagaccacgtcgccgcgtggggtggcgatggtgcggccggcgcgccattcgtgccagaaggcctgggacactttatcgcgcgggcccagctccatgtatttgttcttcggctcgcccagcggggtttccgggcccatgccgtagtcttgcaggtagcggtagccgtctttgttcaccaggatgccgccttcgccgcggcagccctcggtcatcaggatgccggaaccgggcaggccggtcgggtgatactgcacgaactccatgtcgcgcagcggtacgccgtggtggaacgccatgcccatgccgtcgccggtgacgatgccgccgttggtgttgtagcggtaaacgcgcccggcgccgccggtggccatcaccaccgcgttggcgcggatctgcacgcgggtaccttccatcatgttgagcgccaccaggccgcgcgcctggccgtcatccaccaggatatccagtacgaagtgctcgtcgaagcgttgaatttgcgggtatttcagcgaggtctggaacagggtgtgcagcatgtggaagccggtcttgtcggcggcgaaccaggtgcgttcgatcttcatgccgccgaaacgccgcacgttgaccgaaccgtccggtttgcggctccacgggcagccccattgttcgagctgggtcatctcgcgcggacactgatgcacgaagtgatcgaccacgtcctgctcgcacagccagtcgccgccggcgacggtgtcgtggaagtggtagtcaaaggtatcgtgatcctgagtgacggcggcggagcccccctcggcggcgaccgtgtggctgcgcatcgggtagaccttagagatcagcgcgattttcagttggggattggcttccgctgcggctattgctgcacgtaaaccagcgcccccggccccaataatggcaagatcggcgttaaaggtttgcactgcattcctccaatgttcttgttaagaacggcaagttaaatatctatgcttaaaatttagcgaactcttcgggtgctaactaattgaaccgattaatgttgcttaaaggttaaggatagatatctcccaccaataatggggaattaactatacctaaagttaagtagtcgaaatttgatgtgatcgattgttttgtcgattaacgcttgcccaacaggcttgcctgccttttcgcgcgttcggcgtgctttaccctttttaacgcgcttttgccgcctatttatcggaaattggcgttatggccggttgcgcatcgtgaagaatttgtttggctgcaaggatgcgagtagactgcatcccctgtttgatttcggagttaattaccatgagcgaaacggcaagctggcagcctagtgcacccatcgccaatttgttgaaacgcgcagcgattctggctgagatccggcgtttcttcgccgatcgtggcgtgctggaagttgagacgcccaccatgagccaggcgacggtcaccgacgttcacctgttcccgttcgagacgcgtttcgtcgggccgggggcggcagagggcctgacgctatacatgatgaccagcccggaatatcacatgaagcgcctgctggcggcgggcagcggcccgatctaccaaatggggcgcagcttccgcaatgaagaggccgggcggcaccataaccccgaattcaccatgctggagtggtaccgtccgcactacgacatgtaccgcctgatgaatgaggtggacgatctgctgcaacaggtgctggactgcgagagcgcggagaccctgtcttatcagcaggcgttcctgcgccatctggacatcgatccgctgtcggcggagaagacgcagctgcgcgaagcggcggccaaactcgatctgagcaacatcgccgataccgaagaagatcgcgatacgctgctgcagctgctgttcaccgtgggcgtggaaccgcatatcggccgtgaaaagccggcgttcgtttaccacttcccggccagccaggcggcgttggcggagatcagcaccgaagaccaccgcgtggcggagcgttttgaggtgtacttcaagggcattgagctggcgaacggtttccgcgagctgaccgacggccgtgaacaacagcagcgcttcgagcaggacaaccgcaaacgcgcggagcgcggtctgccgcagcaaccgatcgactacaacctgttggcggcattgcagcacggcatgccggaatgttccggcgtagcgctgggcgtggatcgtctggtgatgctggcgctgggcgccgagagcctgagcgacgtattagccttcccggtcgggatcgcctgacgtttcaggcggtgagaaaagcaaaaagggtcggcatttgccgaccctttttttatcgcgagaagcgcttacagccccccggcgtcgcgcttggtgttcggcgccggcgtagacggcggcgtacggccgttgttggtcaaccgcgacagcgtctcggtgcgcacctggaacggcgggtacggcagcgtgatgccgtgctcgcgatagcccgccaggatcagctggtggatctcgtggcgcagcggcatgcggtggcccatctcggcggcgtaaatacgcatctcgaagatctggatgccctgttgcagatcgaccaggtaaacctccggcgccggattatccagcaccagcgagcagcgttcggcggcgttcatcaggattttggtcacctcctcgctgttggcttcgcccggcgccggtacggtcagcaccacacgggtcagggtgtccgacagcgaccagttgacgaactgttcggtgatgaacgctttgttcggcacgatgatctctttgcggtcccagtccgaaatggtggtggcgcgggtattgatcttggtgacggtgccggtcaggttgcggatcgtcacggtgtcgccgatgcggatcggtttctcgaacaggatgatcaggccggagatgaagttagagaagatctcctgcatgccgaagcccaaccccagactgagcgcggtaaccacccactgcagttttgaccattcgatgccgatccaggcgaagctgagcaccgcgccgaacagcagcagcaagtacttggtgatggtggtgatggcgtagccggtgcccggcgacagatccaagtgctgcagcaccgccagctccagcagcgccggcaggttgcgcaccagctgcatggtgatgatcagcaccagaatagcgatcagaaccgcgccgagggtgatcggatgggcggtctctacgccgttcaccgtcgaagtcacgtcccacagcgagatgttttccaggaaggcgaacgcggagtggatctcggaccacagcacgatcaccgacaccagcgcgatcagcgtcaggatcgaccgcaccagccgcagcgactgggcgctgatggtgtccagatcgaagtccgaatcgtccggatcgatggcgccttcggtgctgttcggggtgtgcgaggtttcgtcttcgccgcgggcgcgctgggccaggatgtcggcgcggcgctgtttggcgcgatcgaaggcgatgcgccgccgttggatcagcatccagcggcggatgatgtggtagatgaccagcaacaggaaccagatcgccaccgaggtctccaggcgcgccaacagcgcctgcgcggtggtgaggtaaccgacggtcgacgccagcgccgccagcagcggcgccgacagcagcagcccccagaaggcgctgttgagcatgttgtcgccggagccgtttttatccagatacagcggaatgccggcgcgtttcaggctgtgggtgaccagcgccagcgccagacacagcaggataaagcacagccgtcccagggtgttggcgaactcgcgttctttcaggctatcgaaggtgatcagcgccatgatcagcggcacgatcagccagatcgacatcttgtagtagcgcatggcgcgcgagacctgcttcgccggccagcggaagtgcacgatgaacagcccctgcgggtgggcgaaggcggcgcagatcatgcagatccacaggatcggcagcgtggcggtcacccctttgccgatcgcttctgccaccgggtagttccaggcgctctgcaggccgtaaccgagcgcggcccacagcaccggcagcggcatcgccaccagaatcgaccagaacacggtgcgcaccgtgaggaagaattcgtcctgcgtcaccttgccgacgcggctgctggcgcgctcgaggaaggcgtgatagtgcttgcgtgaactgatgctgaaaatcaccagcagcagggcgccgaagatcgggatcagcgtttcgcggctggtcaccatcatcatgaaggcgccgccgagctgcgacagcgtgtccaacgacaggacgcgcgtcagatcgtgcgccacgttgagcggataagagaagttgatcggattgacgtccggcacccagaacagatagcggtgggtggcgtcgcgaatttcgttcaacgcttcgatcagttgggtgttggccaccttcagcttggtcagctcgaggatttgggtgtcgcaaccggacagcagcgagttgagcagctcgcgctgggtgcgcagctgggcatcgacgatgcgctgctcctggctggtcagcgcgctgccgtcgtcgcgcttgaattcgcgctgcgacagcttttccaactgattttcaaactgcaggcgctgcacgcgcagctgggccatgtcgccgtccagctgttgcggcttgggcatttccggcagcgtcgccacttgggcgcgcagggtttcccccagcgccgacgacgagccgagccactgggcctgttcgatgatggtgctcagcgcctggcgcacctgcagcgtctgtgccgccgcctgccgctgctgcgacgaaatcagatccatgcgctgcgcctggctgttcagcgcggcggacagttcgcggttgatctgcaactgttggctgatgcttcttggcaagtcgccgttctgctcggccaactgctcggttttttccagcgccagttccgcttcgcgttggcgctgggcattgaggttgttgcgcagcgcctgcagctgcacgtctattttctcgtggcgctttttatagacctcggcgcgcatgcgcgccagctcctgccggttgttggccgacagctgcgccagctccagctcgtccactttggctttgcgcgccgccgcttcggtctgcagcagggccagggcggcctgcgcgtacggcgtggtcgggttggcaggctgcgcctgcaggcggcgctgcacttccgtcagcgcacggcgagcgtcggtctgctgctgcggcagctggccgagcgaatcgctgatctcccgcgtgcgatcctgctcttgctgcagcaggcgcgcctgttccagcagcaggctgctggtttgcaggatctgctgttccagctcggcggccggcaaatcgtcgccgttcggcaggatcttgttgctttccagcaccaactgacggcgcagctcctgcgtcatcttcgggaaatcgtcgatcaccctctgatactgctcggagcgagtctgcgactctttgcgctccgtcagccagttgagggcgctttgcagcgcctcggtggtttccgcctgattcggcgcgtttttgctgctttccgcctgcttcagctcctgtttgagctggctctcggtcggcacgggggcggccagcgccggttgccacaacaggcaaccgagcaaaagcgtgatgaaaaggcgcacggcgtcgattcctttagatcggggtctgtggtgtttcagcggcggccgggatttcggcgaaggcttcacccatgcgggtgacggtgccgttatgcagctgcggcgcaaactgcacgctgcctgcggtaaacaggttgatcaccgtggagccgagcttgaaacggcccatctcggcgcctttttccaatgtgatggcgccttcttcaccagcggccgggtaggtccagcgcttgataatgccttcgcgcggcggcgtgacggtgccggcccagacggtttcaatgctgccgacgatggtggcgccgaccaggatttgcaccatcggcccgatgtcggtgtcgaagacgcagatcacgcgctcgttgcgtgcgaacaggttaggcacgttggcggcggtgagcgggttgaccgagaacagatcgcccggcacatagatcatttcgcgcagcacgccggcgcacggcatgtggacgcggtgatagtcgcgcggcgccaggtaggtggtggcgaacaggccgttgcggaacggctcggccaacagatagttgccggccagcagcgcttccaggctgtagtggtggcctttggcctggaagatttgatcctcgcggatcgggccgagctggctgatggcgccatcggcgggcagcgccagccagttggcgtcggcgatgatcgggcgcgcgccatcgcgcagcgggcgcacgaagaagtcgttgaaggtggcgtaagacgccaggtccgggttttgcgcttcctgcatgtccacgcggtagtagcgggcgaaggttttgaccaccagttgggtcagccagccggcacgtttgtcggcgccccagcccgccaggcgggtcagcgccagcttcggcagccaatattgcagtttaatcttgatgctatccagcacgttaacctcgtgaatcagggtaaagggcgcgcattgtaacgagggctccgccgtcgtcaatgcccgcccgtcagtgtcagtctgcggcgtccgtgaagttcttgcgaaccttcacctgcgccatgctttccagaatgcggtggtagttgtcgaaacgctcttccgcgatatcgcctttctccatcgccgcgcggatagcgcagccgggatcggtatcgtggcggcagtcgcggaatttgcaaccgcctaaataatcacggaattcgacaaagccgcgggtaatttgttccggctccaggtgccacaggccaaactcgcgcactccgggggagtcgatcacgtcgccgccgtgctggaagtggtacagccgcgcggcggtggtggtatgttgcccgaggcccgagacgtcggaaacctgatttaccagaatttgctcttcagacggcggcagcagcgcgttcagcaggctggatttgccgacccccgactggccggcgaagatgctgatgcgcccggccagcgcctgttcgaattccgccatgccttcccgcgtctggctggagacttccagcacccggtagccaatcttgcgatagatatccatcatgccgtcgaccagcttgcgcgcttcggcgtccagcaggtcaattttgttgagcacgatcagcggctcgacttcgagcgtttcgcaggccaccagatagcggtcgatgatgttcagcgacagctcgggcaggatcgccgacacaatgacgatctgattgatattggcggcgatcggcttcacgccgtcatagaagtccgggcgcgtcagcaccgaggtgcgctcgtgcaccgcttccacgatgcccttcaccccttcatgggtgcccaggccggggcgccacaccacgcgatcgccggtgaccagcgaacgcagcgtgcggcggatgttgcagcggtgctgagtgccatccggcgcctcaacgtcggcgtgcatgccgaaacggctgatgacgacgccttcctgcggctcgcccagctgggaatcatccggttccggtttgttatcggcgcgcttcaaacggcgctgatggttcgcctgcacgcggcgttgctgacctttggacagtttgttcttactcactgcgcctcacttgaatcggttttatacctttacgtatatgcacagccgcggcggggagttgcccccggcgcagccttgaacccgtcagggtatatgtcgcccaaggcgaccaaaaagactatgatacacgctattttatattaaataaccgttgttagccgccggctgcggcgcgtcgccaccggcggcgcccgtcgtctcgtccgcacagcgtttttctctcggcttttaggcaggaaacatcatgacaggaaacgaaaataacctgatttggatcgatttggagatgaccgggctggatcccgagcgtgaccgcattatcgagatcgccacgctggtcaccgacgccaacctgaacatcctggccgaagggccggtgatcgccgtgcaccaatccgacgagcagctggccttgatggacgagtggaacgtgcgcacccataccggcagcgggctggtggagcgggtgaaagccagccgccaggacgatcgcgccgccgagctggaaaccatcgccttcctgcagcaatgggtgccggccggcaaatcgccgatctgcggcaacagcgtgggccaggatcgccgtttcctgttccgctacatgccggagctggaagcctacttccattaccgctacctggacgtcagcacgctgaaggaactggcacgccgttggaagccggaaattctcggcggctttaagaagcagggcacccatcaggcgctggatgacatccgcgaatcggtggccgaactggcttattaccgcgaacatttcattcagctctaaggcgatggcggcccctgcggggaaaaaacgccgtttttagccgcttaattcgccaatctggcgctttaatcggcaatcaaacaaaaatcgcgtttttttgctttcaggggcttgcggcaaaaaggatttctcgtataatgcgcaccccgtaccgatgaagaatttcgtaacgttccaccatcgatacgccgggcgggaatagctcagttggtagagcacgaccttgccaaggtcggggtcgcgagttcgagtctcgtttcccgctccaaaaattcaaaggtcacgccagtgtttggtgaccggatgccgaaagcatctctatgcgggaatagctcagttggtagagcacgaccttgccaaggtcggggtcgcgagttcgagtctcgtttcccgctccaaattcaacaatgtcgcgatgcggcatgatgaataaataaagcagtatcaagcagtacctatgcgacgcgggaatagctcagttggtagagcgcaaccttgccaaggttgaggtcgcgagttcgagcctcgtttcccgctccaattttctcttcgtttcaaactcaagtccaacgccttatccggcgcggatttttgtcccgttttacacgcccggtaaaaatgttgtgaacagagttatccacagcctctgcacataaactcgcctgcctgaaaaatcaacgtcatacaaattaaatatttatctatttgatttatatgcttatttatttatcccaaaacgttatgccgatcacttgctctttttgttgcagttgaaagacaacgtgtttttatttttatgcacaaatccacagagtaaggatgccggtgatgcggccgcgcggcgcacgccgtcaggcgtccctcggcaaacctttttccacagcccgtatcagccgttttttctgtgccgtctgcacctcgatgccctgcgcttcacggcgagcaagctgttgcgccagcgcccagtggatatgttcgtccagcatgctgtcctggcccaaacgcgtgcgcagcgcgagcacgacgccgtcctcataaggcgcattgcccagcgccacggcgatattgcgcaaccagcgcaggtggccgatgcggcgtatcgccgagccttcggtgatgcgcaggaatttttcttctgtccagttgaacagatcgatcagctgcggcgcatgcagtgcggcgcgcgggctgaaatcgtcttcgtcagtgagctgcgaaaagcgattccacgggcagatcagctggcagtcgtcgcagccgtagatgcggttgccgagcagcgggcggaattcttccgggatcgcgccttccagctcgatggtgaggtaggagatgcagcgccgggcgtcgacagtatagggggcgacgatggcgccggtcgggcaagtggtgatgcaggcgacgcagcggccgcactgctcttcctgcggccgatccaccggcagcggcagatcgatcagcaactcgccgaggaaaaaccacgacccggcttcacggttgagaattagtgagtgtttaccaacccagccgatgcccgccttggcggccagcgcgcgctccatcaccggcgcagaatcgacaaaggggcggaaattcaactcgccgcagtattcctggatctgatcgcccagttttttcaggcgctggcgcaacagcttgtgatagtcacgccccagcgcgtagcggctgacgtagcccagttgcgaattctgcaaggtgctggcgaacgccgccttggccggcaggtagttcatgcgtacgctgatcactcgcagcgtgcccggcaacagttcgtgagggcgtgcgcgcaacatgccgtggcgcgccatccattccatctcgccgtggtactgcttgtcgagccaggcctgcagcttcggctcttcaaggctcagatcggtatcgcagatgccaacctgctggaatcctagcgattgcccccattgcttgatatgttgggcgagttgatgaagatcgagggggtgcgtcatgacgggccacagtgaaaaagcatacgctgacagtttaccacactctgtctggcctgcggattggatccgtcgctcggaacccgcggcggcggcctcgctcggtatttctctttacgatttgatgcagcgcgccggtcaggcggcctacgcgctggctcgcaacgcgtacccctcccgtgaccactggctggtgctgtgtggccacggcaacaacggcggcgacggctatgtggtggcgcgcctggcgaaggcggcgggcgtgcaggtgacgctgatcgcctgcgaaggcgcacgccctttgccaccggaagccgcagcggctcgcgaggcctggcaagctgcaggcggcgacattctgccggcgaacagccgctggccggcgtctgtttcgctcattatcgacggcttgctgggcactggccttggcagcgcgccgcgtgcgccttttgatgcgctgattgaggccgccaaccgccattcggcgccggtggtggcgctcgatgtcccgtccgggctgctggcggaaagcggcgcggcgccgggcgcggtggtgcgtgccgcgcataccgtcacgttcatcggcctcaaaccggggctgctgaccggccaggcgcgcgactgggtcgggcaacttcatcagaatgcgctaggcttatcgggttggttggcgaagcaaccggagcagattcagcggcttaccgccgaggcgttgccgcgctggctgcatccgcgccgtccttgcgcgcataagggcgagcatggccgcctgctgttggtgggcggcgatagcggtttcggtggcgccattcgcatggcggcggaggcggcgctgcgcagcggggcaggattggtgcgagtgcttactcacattgatcatgttgcgccgctgctggcggccaggccggagctgatggcgcaggcgctcgacgaggcgacgctgcggcaggcgatgcaatgggcggatgtgctggtgattggcccggggctgggccaggctgagtggggcaaaaacgccttgagcgtgctgcaaaccagcgataaaccggccttgtgggacgccgatgcgctgaacttgctggcattaaatcccgagaaacggcagaatcgcgtgatgactccgcatcctggagaggcggcgcggctgttgagctgcagcactgccgacatcgagagtgatcgcttacttgccgtgcgcaagctgacggcgcgctacggcggcgtggcggtgctgaaaggcgccggtacgctgatcgccgatgagcaggggcagatggcgatcgccgacgtcggcaacgccggcatggcctccggcggcatgggcgatgtgctgtcgggcatcatcggcggtttgctggcgcaaaagctcccgctgtatgatgccgcctgtgcgggctgcgtcgtgcatggcgcggccggcgatcgcgtagcggaaagacaaggaacaagaggcatgttggcgaccgatttactgccggacatccttcatttcgttaaccctgagtgggcaaaatagactttatcgaatgaaagaactcgttttacctctgccggacgaggcagcgactgtcgctttgggcaccactttggccaaggcctgcgatcgcgccagcgtcatctatctctacggcgacctgggcgccggtaaaaccaccttcagccgtggcttcctgcaggcgttggggcatcagggcaacgtcaaaagcccgacctacacgctggtggaaccctatgccttgcagccgctggcggtgtatcacttcgatctgtatcgcctggccgatccggaagagcttgaattcatgggcattcgcgattacttcgcgcaagacgccatctgcctggtcgaatggccgcagcagggcaccggcgtgctgccggagccggacctggcgctgcacctcggctatcagggcgagggacgagaggcgaagatcgaggcgatttctgcttacggcagccagctgttagaccgcattcatggatcacagggatgatgctgcaatgacgcaggtgttgaaaaaatttgcggtcatcatgctgatcgccgtgctggggccgctcggcgcgttgaacgcgctggcggcgtcctcgctgtccgatatcaaagtgtcgaacgcccaacgcgaagcgacggtgtcggtgagcttcaatggcccgccggactatgcgtttttcccgctgcacggcccggaacgggtggtgctggacgttaaccagaagggcaaagtcggcggcctgccgctcaactttagcgggcaaaacctggtaaagagcattcgctccagcgcgccgaaagacgctcagagcgtgcgtctggtgtttgatctgacccagcgcgccaaaacccgcgtttccactcgccagaacggcggcgtgcataccgtggtgttcaccatttcggccgaaggcggcgccaatatcgtggcgcgtaaagcgccggtgcaaacgcctccgccggtcgccgtcagccacccgccgcgtcaggcgccggttgcggtgcgtgaagcgccggagccgccgctgcgcaaagcgccgacgggatcgaatccctttacccaaaaacagactgtggtcgcaggcaccgccactgaggtcacgccgcgcagcagccgcgtttccgccggttccggcgatcgggtggtggtggcgatcgacgccggccacggcggccaggatccgggagccattggcccgagcgggttgaaagaaaagaatgtcaccatcgccatcgcgcgccgcctgcaggcgatgctggacgccgatccgcagttcaaaccggtgctgacgcgtaacggcgactattttatctcggtgatggggcgttccgacgttgcgcgcaaacagggcgccaacgtgctggtctccatccacgccgatgccgcgccaaaccgcagcgccagcggcgcttccgtctgggtactgtccaaccgccgcgccaacagcgaaatggccggctggctggaacagcacgagaagcagtctgagctgctcggcggcgccggcgatttgctggccaatagccaggccgacccttatctgagccaggcggtgctggatctgcagttcggccactcgcagcgcgtcgggtacgatgtggcggtgaaggtgctgcagcagcttcagagcgtcggctcgttgcataaacgccggccggaacacgccagcctgggtgtgctgcgttcgccggatattccatcgctgctggtggaaacaggatttatcagtaatagcacggaggagcggctgctgggcagtagcgcgtatcaggagaagattgccaaggccattcataacggcctgcgcagctacttcctggcgcatccgctgcaagccgacccaaaggtggaaaaccgaccgctggacgtcgcagcggcggttaacacctcaacaccagacgtgcgccagccggagcctatcgtcagcccggccggcgcgagccgcagcattagcggcaaaacccagatccacgtggtgaagcgggcggagacgctgtccggcatcgccgacagctacggcaccaccatggcggccctgcgggatctgaacaaactgaagaaagacggcgtgtgggtcgggcaacgcctgaaggtgccggcggggaaaaccgccgccgtcaccgccgtcgccaaggcgaaaacgccggcgaagaagccgtctaaacataaagtggcccgtggggacacgctgtcctctatcgcttctcgttatggggtcagcgtcggcgatctgaaacgggtcaataatctgaagtcggacgtcgcgccgctggatcggacgctgaccattccgcaggcctagcgccaccgctacaggagtcagcatgcctatccaggtgttaccgccacagctcgccaaccagatcgccgccggagaggtggttgaacgccccgcgtcggtggtcaaagagctggtggaaaacagtctggacgccggtgcgacgcgcatcgatatcgatatcgaacgcggcggtgccaagctgatccgcattcgcgataacggctgcggcatcggcaaggacgacctggcgctggcgctggcgcggcatgccaccagtaaaatcagcacgctcgacgacctggaagcgatcgtcagcctcggttttcgcggcgaagcgctggccagtatcagttcggtgtcccgtttgaccctgacgtcgcgcaccgccgagcagagcgaagcgtggcaagcctacgccgaagggcgcgagcaggcggtgacggtcaaacccgccgcgcacccggtcggcagcacgctggaagtgctggatctgttttacaatactccggcgcgccgcaagttcatgcgcaccgagaaaaccgaatttggccatatcgatgaagtggtgcggcgcatcgcgctggcgcgtttcgatgtggcgatcaacctcagccacaacggcaaactgatccgccaataccgggcggcgaaggaagagagccagcacgagcgccgtttgggcagcatctgcggcccggcgtttttacagcatgcgttgagcatcgactggcagcacggcgatctgagcatccgcggttgggtggcggatccggccggggcacgccagctgggtgaaatgcagtattgttacgtcaactgccgcatgatgcgcgatcgcttgatcaaccacgccattcgtcaggcctatcaggaccagttgaaggacgatcagcagcccgcttacgtgctgtatctggaggtcgatccgcaccaggtggatgtcaacgttcatcccgccaagcacgaggtgcgtttccatcaggcgcggctggtgcacgattttatctaccaggcagtgaccaccgtgctgcaacaggccgggcagacgccgtcgctgccgctggcggaaacgccggacgaagcgcccgcgccggtctggcagcaggaaaaccgcgtcgccgccggcggcaaccatttttctctgccggcgtcgcgacgtgaaacgccgtcatcgcccggcgccgcccgcgagcgcgcgccgcagcccggttggcaaacggcgggcggttaccaaaaacgcgaaggcgagctgtacggtaaactgatgcagcccgccgccgagctgccggccgaggccgcgccggaaaccccgagcaagccgccgctgttcccgccggcgaaagccgcagcggaaacgccgttggcgagcgggcaacacagctttggccgggtgctgatgatccatccgccgtgttatgcgttgattgaacagcgccagcagccggcgttgcttaacctgacggtggcggaacgctggctgcgccaggcgcagctcaacccgccggcagaagggctgcggccgcagccgctgctgatcccagtcaagctgacgttggagaagagcgaagcggcggccatcgcgcggcatcaggcgctgctgacgatgatggggctggatctgcaggcggatcacggccgtgtgacgctgcgcgcagtgcctttaccattacgccaacaaaatttacaaaaactgatacccgaactgttaggctatctggccgaacatcaggagatgtcgcccgcggtgctggctacctggctcgctcgccgccttggcagcgaacatgaacagtggaacacctcgcaagcgatacaattgctgaccgacgttgaacgactttgcccgcagctggtcaaatcgccaccgagcggacttttacaacccgttgatttacaggccgcactggcggccctcaagcatgactgacactgaaatgacaccacgtcccccggctattttcatcatggggccaaccgcctcgggcaagactgcgctggcgatcgcgctgcgtgaacgcctgccggtggagctgatcagcgtcgattccgcgctgatttaccgcggcatggatatcggcaccgccaagccgagcgccgaagaattggcgcaggcgccgcaccggctgatcgatatccgcgatcccgccgaagcttactcggccgcggagtttcgcgccgatgcgttgaaagagatggccgacatcaccgccgccggccgcattccgctgttggtgggcggcaccatgttgtatttcaaggcgttgctggaaggattgtcgccgttgccgtccgccgatcccgcggtgcgcgagcgcatcgaacggcaagcggcggagcagggctgggaggcgttgcaccgtcagttacaggcgatcgatccggtcgcggcattgagaattcatccgaatgatccgcagagactgtccagagcactggaagttttttttatttcgggtaaaactttaacggaactgactaaaatttcgggtgaatcgttgccgtatcaagttcaccaatttgcgatagcgccgaccagccgtgagttgatccatcaacgcatcgagctgcggtaccatcaaatgttggcggcgggttttgagacggaagcgcgtgcacttttcgcacggggtgatttgcatacggacttgccctccattcgctgtgtcggttaccgccagatgtggtcatacttgtctggtgaaattagttacgatgagatggtttatcgtggtatttgcgcaacgcgtcagttggctaaacgccagatgacctggttacggggttgggagtcggtccattggttggacagtgaaaagccgggagaggctttggactcggtgacacaggttgttagtgcataggttgggtgattgtgtacaattgctgagtattcagcgcgcaaattttttacgtcgtttattttagagccgacaggttcttagttacaaacaacaagcaaataaggaaaagatagaatggctaaggggcaatctttgcaagatccgttcctgaacgcattgcgtcgtgaacgtgttccggtttctatttatttggtgaatggtattaagctgcaaggccagattgagtcttttgaccagtttgtcatcctgttgaagaacacggttagccagatggtgtacaagcacgctatctctaccgttgtcccgtcacgcccggtttcgcatcacagcaacaacccgagcggcggttcaagcaactatcaccatggcaacaatccgtctgcgcagcaacagccgcagcaggaaagcgatgacgctgaataaagcgcgttgcaagtcaaccatgacggggagcataagcagccgcgggctgtttatgtcccccaaactcacggtgagtgtccgtttgagaggttgcacgcttgtttgaccgttatgaagccggtgagcaggccgtactggttcatatctatttctcgcaagacaaagatacggaagacctcaacgagttcgaatcgctggtctcctcagccggtgtcgaagctttgcaagtggtgactggtagccgcaaagccccgcatccgaagtactttgtcggcgaaggaaaggccgaagaaattgcagatgcggtgaaagccagcggcgcgtctgttgtcctgtttgatcattccctttccccggcgcaggaaagaaacctcgagcgcctgtgcgaatgccgggtgatcgatcgcaccgggctgattttagacatctttgcccagcgtgcccgcacccatgaaggtaagctgcaggtggagctggcgcagttgcgtcacatcgccacgcgcctggtacgcgggtggacgcacctggagcggcaaaaaggggggattggcctgcgcgggccgggggaaacccagcttgagaccgaccgtcgcctgttgcgcgatcgcatcagcttgattctgcgccgcctggagcgggtagaaaagcagcgtgaacaaggccgacgcgcgcggacccgcgccgatgtgccgaccgtatcgctggtgggctacaccaacgccggcaaatccaccctgtttaaccgaataacgtctgccgaggtgtatgcggcggaccagctatttgccaccctggatcctacgttgcggcgcattgacgtgccggacgtgggggataccgtgttggcggataccgtaggctttatccggcacctgccgcacgatctggtggccgccttcaaggcgacgctgcaggaaacgcgccaggcatctctgctgctgcacgtcatcgatgccgcagatccgcgcgtcgatgagaacatcgaagcggtgaacaccgtgctggcggagatagactcggatgaaatccctacactgttagtgatgaataaaatagatatgctggacgattttgtgccgcgtatcgaccgcaacgacgaaaacctgccgatccgggtgtggctgtccgccgccagcggagagggtattccgttgctgtatcaggcgttgacggagcgcttatcgggggagatcgcgcattacgaattgcgcttaccgccacgggcaggccgtcttcgcagccgtttttaccagcttcaggcgattgaaaaagagtggaacgaagaagacggcagcattggcgtggtggtgcgaatgccgatcgtcgaatggcgtcgtctctgcaagcaagaacaggacctgattgactttatcgtatgatcatatcctgttacatttatgcttcgcgaaagcctgaagtacccaatcacagaatatggagctaaaacatggcgtggaatcagcccggtaataacggacaggaccgcgacccgtgggggagcagcaataacaatggcggcaactctggcggtaacaacaaaggcggtcgtgatcaagggccacctgatttggacgatatcttccgcaaactgagcaagaaattgagcggtttcggcgggggcaaaggctccaacagcaatagcggcggcaccggcacctctgggccgggcttcagcggccgcattatcggtatcgcggcggtcgccgtggtggtgatctgggccgccagcggcttctacaccatcaaggaagccgagcgcggcgtcgtgacgcgtttcggtaagttcagccatctggtgcagccgggcctgaactggaagccgaccttcatcgacgacgtgcgtccggtgaacgtggagtccgtgcgcgaattggcagcgtccggcgtgatgctgacctccgatgaaaacgtggtgcgcgtggaaatgaacgtgcagtaccgcgtgaccaacccggaagcgtacctgttcagcgtcgtcaatgccgacgacagcctgagccaggcgaccgacagcgccctgcgcggcgtgatcggcaaatactcgatggatcgcatcctgaccgaaggccgtaccgtggtgcgtaacgatacgcagcgcatgctggaagagaccattcgtccttacaacatgggcatcacgctgctggacgtcaacttccaggcggcgcgtccgccggaagaggtgaaggcgtcgttcgacgatgcgatcgccgcgcgtgagaacgagcagcaatacatccgtgaagcggaagcttacgccaacgaagttcagccgcgtgcgaacggccaggcgcagcgtctgctggaagactccaaggcttataaggaccgcaccgtcctggaagctcagggtgaggtggcgcgctttgccaagctgttgccggaatacaagtccgcaccgcagatcacccgcgagcgtctgtatatcgaaaccatggaaaaagtgctgggccatacccgtaaggtgttggtgagcgacaaaggcaacaacctgatggtgctgccgctggatcagatgctgcgcggccaaggcgcggcgacggagagcggcaataataaggataccagcctgattcgccttaatccgaatcctgcgccggctgccaacagcagcactccgcgcaccagcggcggatcggttatggatcagcgccgggcgaatgcgcagcgtgacgacaccactcgcgtagggagagagtaatcaatgcgtaagtcttttgtagttattgtcctcgcggtgctggtggtgctgtacgcttcgctgttcgtggtgcaggaaggccagcgcggcatcgtgctgcgcttcggcaaggtgctgcgcgatggcgaaaacaagccgctggtgtatgcgccgggtctgcacctcaagatcccgttcattgagaccgtgaagaacctggatgcgcgtatccagaccatggacaaccaggccgatcgcttcgtgaccagcgagaagaaagacctgatcgtcgactcctatctgaagtggcgcatcagcgatttcagccgttactatctggcgaccggcggcggcgacgtctcccaggccgaagtgctgctgaaacgcaagttcagcgaccgtctgcgttccgaaatcggtcgcctggacgtgaaagacatcgtgaccgactcgcgcggcaagctgatgtctgacgtgcgtgacgcgctgaacaccggcacagtgggcgacggcgaagaagtggcgaccaccgaagccgatgacgctatcgcctctgcggcggcgcgcgttgagcgggaaaccaccggcaaacagccgcaggtgaacccgaacagcatggcggcgctgggcatcgaagtgatcgacgtgcgtatcaagcagatcaacctgccggccgaagtgtccgacgccatctaccagcgtatgcgcgccgagcgtgaagcggtagcccgtcgtctgcgctcgcagggccaggaagaggccgagaagctgcgcgccagcgcggattacgaagtgacccgtaccctggcggaagcagagcgtcaggcgcgtatcacccgcggtgaaggcgatgccgaagcagccaagctgttcgccaatgcgttcagccaggatccggacttctatgcctttatccgcagcctgcgcgcctatgaagccagcttcaaggacaaccaggacgtgctggtactgagcccggacagcgatttcttccgctacatgaagtcgcctgataccctgcgcaaataagcgcggcaggcaatctgatcgagggcccgtttacgcgggccctttctcgtttttgggggatgcatgaactcaacgatttggctggcgctcgggctggttctggtgctggaaggattggggccgatgctgtttccgcaggcctggcgcaaaatgattgtggcgatgtcgcagttgccggacgcgacgctgcggcgatttggcggtggaatagtggttgcgggctgcgtgatctactacatgttgagcggccgcacgggtctttaaagtctagcccaaaatttatgcaatcgtatgctaaaagtgctgaaaatcgaaaattacggtggtagaatccatttttaagcaatcggtgattttgaaaaatgggtaagaacgtcgtcgtactgggcacccaatggggtgacgaaggtaaaggcaaggttgtagacctgctgactgaacgggctcaatatgttgtgcgctaccaaggtggccataacgctggccacactctggtaatcaacggtgaaaaaaccgttcttcatttaattccttcaggtattctgcgtgaaaacgtcaccagcatcatcggcaacggtgttgttctggcgccggacgcgttgatgaaagaaatgggtgaactcgaagcgcgtggcatcccggtacgcgaacgtctgttgctctctgaagcttgcccgttgatcctgccttaccacgttgcgttggataacgcgcgtgagaaagcgcgcggcgcgaaagcgatcggcaccaccggtcgcggcatcggcccggcttacgaagataaagtggctcgtcgcggcctgcgcgtcggcgatctgttcaacaaagaaaccttcgccgttaagctgaaagagatcgtcgattaccacaacttccagctggtcaactactacaaagttgacgccgtcgattatcaggcgacgctggactatgtgctgtctatcgccgacatcctgaccgccatggtggttgacgtttccgaactgctggacggcgcgcgcaagcgtggcgacctgatcatgttcgaaggcgctcagggcaccctgctggatatcgaccacggtacttacccgtacgttacctcttccaacaccaccgcaggcggcgtagctaccggttccggcattggcccacgttatgtggactacgtgctgggcatcgtgaaagcctactccactcgcgtgggtgcaggtccgttcccaaccgaactgttcgatgaaaccggcgagtacctgtgtaagcagggtaacgagttcggcgccaccaccggccgtcgtcgtcgtaccggctggctggacgcggtagcggtgcgccgcgccgtgcagatcaactccctgtccggcttctgcctgaccaaactggacgtcctggacggcctgaaagaagtgaagatctgcgtgggctaccgcatgccggacggccgcgaagtggacaccactccgctggcggctgaaggctgggaaggcatcgagcctatctacgaaaccatgccgggctggagcgaaaccacctttggcgtgaaagagcacagcaagctgcctcaggctgcgctgaactacatcaagcgcatcgaagaagtgaccggcgtaccggtagacatcatctctaccggcccggatcgcagcgaaaccatgatcctgcgcgacccgttcgacgcataatcaggctttgcggcattaaacaaaccgggcgcgtcccggtttgtttttatcctgactccctccgattgcggtttcacgtcaaaaaatcctttcataaacccgccttagggcgcgggattcgctaaataattagcgacgaactctccggctggtttattatccaatgagtaatcttttgaatagcgccgaaaagcggcgtatcagacgggtaaagtgatacccagaggtaaaatgtgcagttaacaagttttactgattatggcctgcgggcgttgatctacatggcctcgttgccgcaggacaagatgaccagcatctcggaagtgaccgaggtttatggcgtgtctcgcaaccatatggtgaagatcatcaatcagttgagccgggtaggttttgtcacggcggtgcgcggtaagcatggcggcatccgtttgggcaaaccggccgagagcattcgcctcggcgacgtggtgcgggcgctggagccgctcgcgctggttaactgcagcagcgagttttgccacatcacccctgcctgccgattgaagcaggtgctccaacagggcgtacagaatttccttgaagagctggataagcatacgttggccgacatggtcgaagacaatccgccgctctacaagctattgcttgtcgaataaaacgacgttgagaagacaaggctcaacgtcatcctgctgatgacaacggaggaaccgcaatgtcacaagatccattcctggaacgagaagcagaaaaatacgaatctcctatccccagccgtgaatatatcctggcccatttggcgaaaagagaaacgccggccagccgcgaagaactgggcaacgaattgggtctcagcggtgaagaacagctggaagcgctgcgccgccgcctgcgcgccatggagcgcgatggacagttagtgtttacccgccgccagtgctacgcgctgccggaacgtttggatctgctgcgcggcacggtgatcggccaccgtgacggctacggcttcctgcgcgttgaaggcagcaaagacgacctgtacctgtccgccgaacagatgaaaatggcgatccacggtgacgtggtgctggcgcaggcgctgggcgcggatcgcaaagggcgccgcgaagcgcgcatcgtgcgcgtgctggtgccgaaaaccagccagatcgtcggccgcttcttcatggacgccggtaccggcttcgtggtgccggacgacagccgtctgagcttcgatattctgatcccggcggacagcgtcagcggcgcgcgcatgggctttatggtggtggtggagttgactcagcgtccgacccgccgcaccaaggcggttggcaagatcgttgagatcctcggcgacaagatgggcaccagcatggcggtggacatcgcgctgcgcacccatgagatcccgcatacctggccgccgcaggtggaaaaacaggtggccgatctcagcgaacaggtgccggaagcggccaagaagggccgcgtcgatctgcgcaagctgccgttggtcaccatcgatggtgaagacgcgcgcgacttcgatgacgccgtgtactgcgagaaaaaacgcggcggcggttggcgcctgtgggtggcgatcgccgacgtcagctactacgtgcgtccgcgcaccgcgctggacgatgaagcgcgcagccgcggcaactcggtgtatttcccgtcgcaggtgatcccgatgctgccggaagtgctgtccaacgggctgtgctccctgaacccgcaggtcgatcgcctgtgcatggtgtgcgagatgaccatctccgcccaggggcgcctgtccacggccaagttctacgaggcggtgatgagctcccatgcccgcctgacctacaacaaggtgtggcacattctgcagggcgatcaggagctgcgcgagcattaccatccgctggtcaagcacctggaagagctgcacgccatgtacaaggtgctggataaggcgcgcgccgagcgcggcggcatcgcgttcgaaaccgaagaagccaaattcatcttcaacgccgagcgtcgcatcgagcgcgtagagccgacggtgcgcaacgacgcccacaagctgatcgaagagtgcatgatcatggccaacgtggcggccgcgcgcttcgtcgagaaacgcaacgagccggcgctgtaccgcgtgcacgatcgtccaagcgacgatcacatctccgcactgcgcagcgtgctgagcgaactggggctgacgctgggcggcggcaataagccgcagccgaaggactatgcggtgctgatggatgaagtgtctgagcgccctgaccacgaaatgctgcaaaccatgttgctgcgctcgatgaaacaggcgatttacgatccggaaaaccgcggccacttcggcctggcgctggcgtcttacggccacttcacctcgccgatccgccgttatccggatctggcgctgcaccgcgcgatcaaatatcagctggccaaagaacacggcgagccgaaagagcgctggacgccgaccggcggctggcacagcgaatttgaagagatgctgcagctgggcgaacactgctcgatgaccgagcgtcgcgcggacgaagcgacgcgcaacgtcgccgactggctgaagtgcgacttcatgcaggatcacgtcggtgaagtgttcagcggcatcatctccagcgtgaccggcttcggcttcttcgtgcgcctgaacgatctgtttatcgacgggctggtgcacgtatcaacgctggataatgattactatcgctacgataatatcggccagcgcctgatcggcgagtcttccggcacggtctatcgcctgggggatacggtggagatccgcgtggacgcggtgcatatggacgagcgcaagatcgacttcgcgctggtgtccagcacccgcaaagcgcgcggtgaaggcaaaaccgagcgcgatcgcgccaagaaaggcggccagcgtacgctgcgcgacaacggtagcgcagggcgcggcaagcgccgcggcggcaaaccgccggccaacttcgagccggacagcgccttccgcaagcaggatgacgccaagcctgcggacaacgtgaagaaggcgaaaaagaaagccaagaaagcgtccgacaaaacgcggaaaatcgcggcggcgaccaaagccaaacgcgcagccaagaagaaaggtgccgagcaggcctaacctgccgcacatcgttatcatcggccggttatcgccggccgcacgaatttaaaagagcatcatgagcgaaattatttacggcatccacgccgtcaaagccctgttagagcgcgacccgcaacgcttcctggaagtgtttatcctgaaaggccgcgaagatcgccgcctgcaaccgctgatcgccgagctggaagcgaccggcatcgtgatccaggtggcgaaccgccaatggctggatgacaaggttgaaggcgcggtgcaccaggggatcatcgcccgggtgcgcgaagggcgtcagtatcaggagaacgatctgccaggcctgctggaaagcgtggagacgccgttcctgctggtgctggatggcgtgaccgacccgcacaacctcggtgcctgcctgcgcagcgccgacgcggccggcgtgcacgcggtgatcgtgccgcgcgaccgttccgcccagctgaacgccaccgccaagaaagtggcctgcggcgcggctgaaaacgtgccgctgatccgcgtgaccaacctggcgcgtacgctgcgtctgctgcaagagatgaatgtctgggtggtgggtaccgccggtgaagccgaccatacgctgtatcagagcaaaatgaccggcccgatggcgctggtgatgggcgcggaaggcgaaggcatgcgccgcctgacccgcgaacactgcgacgagctgatcagcatcccgatggccggtaccgtctcttcgctgaacgtgtcggtcgccaccggcatctgcctgttcgaagcggtgcgtcagcgcggctgattctcctgacgggggcgcagtgcccccgttaattccccctcttgtgatcccgcctgcggcagaaatccctgcgccgaccatacttactcctgacgcttttttcagggagcactctcatggtctggactacgcacaccgtttttaaccaacccaagccgctgggcaacagcaacctgtttctctccgatacgccgctgcgtgaagcgttgcagcgcgagcaaggcggttgggacgccgaggtattggcttcgctgggccagcagctcggcacgcaggagtcgctggagctggggcggctggccaacgccaacccgccggagctgctgcgctacgacgccaccggccagcgactggacgacgtccgctttcacccggcctggcatatcctgatgcaggggctgatcgccaaccgggtgcacaacctgccctggcaggaggatgcgcgcatcggttccttcgtggcgcgcgccgcgcgctttatgctgcatgcgcaggtcgaggccggcacgctgtgcccggtgaccatgaccttcggcgccacgccgctgctgcagcaggcgttaccggccgagtttcgctcctggctgacgccgttgctgtcggatcgttatgacgctcacctgctgccgggcgggcaaaagcgcggcctgctgatcggcatgggcatgacggagaagcagggcggctccgatgtcttgagcaataccaccaccgccgtgccgctcggcgcgcgtgggccgggcgaagcctaccggctggtggggcacaagtggttcttctcggtgccgcagagcgatgcgcacctggtgctggcgcaggccgaaggcgggctgtcctgcttcttcctgccgcgcattttgccggacggcagccgcaacgccattcgcctggaacggctgaaagacaagctgggcaaccgctccaacgccagcagcgaggtggagtttcaggacgccgcggcctggctgctgggcgatgagggcgacggcgtgcggcatatcctgaaaatgggtggcctgacccgtttcgactgctcgctgggcagccacggtctgatgcgccgcgggttgtcggtggcgttgtatcatgcgctgcagcggcaggcattcggtaagctgttgatcgaacaaccgctaatgcgccaggttctggcgcgcatggcgctgcggctggaagggcataccgcgttgctgttccggctggctcgcgcctgggaaagtcgcagcaatgagggcgagctgatctacagccgcctgctgacgccggcggccaaatacagcatctgccgccagggcatgccgttcatcgccgaggcgatggaggtgctgggcggcatcggctactgcgaagagagcgagctgccgcgcctgtaccgtgaaatgccggtgaacagcatctgggagggctccggcaacatcatgtgtctggacgtgttgcgcagtctgcataaactgccgggcgcgctcgagatgttgcagttcgagctgcagccggtgcgcggccagaatcggttgttcgatcacgcctggcggcagtggcagcagcgcgcccggcaaccgcgtgaagagatggggcggctgctgacccagcagctgttcgacctgtgctgcgccgcgcagctgctgcagcatgccagcccgcagatcgccgacgcctggtgccacctgacgctggatcatcgcggcgagagcctgctgtcggccgaggtgtgcgaactgctgctgaaccgcgccatcggcggttagggaaaagggtggcgcgcggcggcgaaaacctttttaattcagcctcactctgacaggaaaatgcacatggatattctcagcgcgttggcggcgttcgcctcttacttcttcagcggtttcgccatgattttggtgtttctgttcgtctatacccgcatcaccccgcacgacgaatgggcgttgatcaaggccgataatcaatccgccgcctttgctttcatcggcgcctgcctggggtatgtgatcccgctggccagcgcggcgatcaactcgatcagcctgctggattacctgctgtggggcgtggtggcgctggtggtgcaactgctgctgttcgcggccgtgaagatctacatgccgcgcatcagcgacaagatagaagcgaatcacctggccgccgggattttcctggggggcgtctccgtcagcggcggcgtgttgaatgcggcttgcatgagctactaaaggtataagatggccgaggcgcgccagccaagcgggtgcgcctgctcttccatccgcaggatgcggtaatagctggcgccgtgttggccggcggtgcgggcgatggccagttccgcttcctgcggcgagccgggcagatcgctgaaggtgatctcggcgatttcactgagcggcgtcacgcgatcggcgggcgccagctcggcgggctgtgcgccggtgctgagcaaccccatggaaagcaagagggaggtgagtgcggtggagcgtttcatggcgttccccttcgtcagatcctgaatcgcacccgcaacatgcggcatgctgtccctcagtgtgcaacaccctgcttcagcctgtgcaaagccagtgtaaatctgcttaaaaaatccccgccttagcgatacaggatcgcctgggaataccattggcccggcacgacggtttcgctgttcatgatgatcacataataacgggcgccggcggcggtggccttgcgctggatctccgcttccacgtccatcgggctgccgcgtaccacggcggtgacggtgccgattttcaccagctcggcggtctgcgcgcggacgatctcctgcgcctgtgtggtgggcggcggcggcggtttcggcgtggtggtcatgatgccgcaggcggaaagctgtgcggccagcgtcagggcgataagtgtgcggacaaacgtcatgggaacctcgaaagagccggtgcgatggcttcagtgtaacgcaatataagctggaacagattgagctaacgctggctggcgcaagtttgtcatgatgaatgccaacaggtgagttgaggatgaacggatgatcgaaattcatgacgagcgggcgggcgatattgcggtgatccatgcggtgccggcggggcagtatcatcggccgctgccgacggtgttcttctgccatggctatacctcgtcgaaagaggtgtacgcctacttcgcctatgcgctggcgcgcgccggttttcgggcggtgctgccggatgccgatcggcacggcgagcggttcgacggcgatgagacgcggcgcctggcggcgttctgggagatcctgcgcagcaatatcgacgagctgccgcagatcaaggcacattttgagcggcttggcctgattgccgacggacgcatcggcgttgccggcgcctcaatgggcggcatgaccgcgcttggcgccttcgcgcgcttcccgtggatccgggcggccgccagtctgatgggctccggctattaccgttcactggcgcaaacgctgtatccgccgttgggcgaagagggcgaggtgctctcgccggcggcgtttgccgcgcgcaccgccgtgctggcggaatatgagctggaagggcgtttggagacgatagccgggcggccgttgttgctgtggcacggcgagacggacgacgtggtgcctgcggcggacagcctgcgtttggcggccgaactgcggcggcaaggcgcggatggccgtttgacgtcgctcgtcgagccgggggtgaagcaccgcatcacgccgttggcgttgtccgccacggccgactttttccgccgcgagctgtgatgcgccgccgggcacgatgcatggaattgcagcgctctgtgcctgctgtttcggccatcgtttggccgaatgaaggggagaatgtcagcgtgaattctttcagggcagcaaggagcagagggcatgataaaaagcatcggcagtgtggccggcttaatgggaacgatgaaagcgcgcgccgagcttaactcagcggccttcagcgagatgctggaggcagccgacggcaaggtgcatccgctgtcgcgcattaccgcgcagacggtgcaaaacatgacggcactgttctctttcgcgccgaaagcggcggccactcacactgcggcgccgggagcgctctcgttcgaacagcgggcgaccctggcggaaagtgccgatctgctgcaaatgcgcacccactatctgcggatggcgttgcagttgcacaatccgggcaaggcgctcaacgcgccggcgttgctcaagctctgattggcgggggaagcggagcgcccaacgggcggcgctccggtgcggactgaacgggctttctgatgaagccctgggatttccctggcgtggcgcgtctctttagcggtacagctcggcgctgacgtgcatcgtgctgttgtcgcccggttcgtgcagggcgatgatgcgataagagcttgcgccgcgttggtcggcgattttactgacctggctgctggcgtcgtccggcgaaaccacattctggttcagggtgacgaagccgacgctttggcgttgatcggcctggtgcgaggtgatctccgtcgcggccatcacattggcggagaacagggcggccagcgccgtcgcgagaataatgcgtttcatagtgcctctcttactttttgccgttacggcctgacagcgagtgtcgctgcggcaaaaagtcatttatctgcattgaataacctgggatctttttcgtcgcgctgtctgcggcggatatggttaattttagtccgttgccggcgattaaaaagcggggtgttttgaaggcatccttcaaaaaaagtgaaatagatttgtgactcaacgctgatttcattgaaagatttttgaaactgatggatcggcgtacataggttcactcacgagcaaatcgtgctatttcccatagcgcctcgcattaacgcgaataaaacccacgcagtccttgagtttcccgccctgcgtcagtatgattacgcgtcatttttcagccgcacactaaacacgttccttgcttccatgggccgcggttgaccctgacaggaggctgaataatccgtaaggagcaattcgatgcgtcattacgaaatcgtttttatggtccatcctgaccaaagcgaacaggttccgggcatgatcgagcgttacagtgctaccatcactaacgcgcaaggtcagattcaccgtctggaagactggggccgccgtcagctggcttatccgatcaacaaactgcacaaagctcactacgttctgctgaacgttgaagcgccgcaggaagcgatcgatgagctggaaactaacttccgcttcaacgacgccgttatccgcagcatggttatgcgcgttaagcacgcggtaaccgaagcatctccgatggttaaagcgaaagacgaacgtcgtggcgatcgccgcgaagacttcgctaacgaaaccgcagatgatgcagatgctggggattctgaagagtaattgccgccgtgacggctaatcgtctggttttgtcgggcactgtgtgcaaggcgccggttcgaaaagtgagtccttccgggataccgcactgccaatttgtgctagagcaccgttcgcagcagacggaagccggattcagcagacaagcatggtgccgaatgcccgtggttgtcagcggacaacagtcacaagcactaactcaaagattaacggtcggcagtcagattaccgtgcaaggctttgtaagctgccatcaagggcgcaacgggctgagcaaattggttctgcatgccgagcagattgaattgatagattctggagactagccaaatggcacgttatttccgtcgtcgcaagttctgccgtttcaccgcggaaggcgttcaagagattgactataaagacatcgctacgctgaaaaactacatcaccgaaagtggtaaaattgtaccgagccgtatcaccggtactcgtgcaaaatatcagcgccagctggcccgtgctatcaagcgcgcgcgctacctgtctttgttgccgtacactgatcgtcatcagtaatcggccactgtccattaacgactttgagaggataaggtaatgcaagttattctgcttgataaagtagcaaacctgggcagcctgggtgatcaagttaacgttaaagcgggctacgctcgtaacttcctggtaccacagggcaaagctgttcctgctaccaagaaaaacgttgagttcttcgaagcacgccgtgctgaactggaagccaaactggctgacgttctggctgctgctgaagctcgcgcaaccaagatcaacgaactgggttcagtcaccatcgcttccaaatctggcgacgaaggtaaactgttcggctctatcggcacccgcgacatcgctgacgcagtaactgcggcaggcgttgaagttgccaagagcgaagttcgtctgccgaacggcgttctgcgtaccactggcgagcacgaagtgcacttccaggtacacagcgacgtgttcgcacagctgaatgtagttgtggttgcagaagcgtaatttacgctgctgttaaccggttaaaacgccagcctcgcgctggcgttttgcttttctgcgtccggcaaaacgcgctacgcttgaagacgggatgaaaaggagagcgtgcgatggcaacgattacgctacagcgggtttacgatttcagcgcgccggcgccggaacactgttatctgatagaccggctatggccgcgcggcatcagcaaagagcggttgacgggcgtgcagtggttgaaacaggtggcgccggatgacgagctgcgcaagtggttccatcagcataccgaccagtgggaagcctttgagacgcgctatcgccaacagctggcggccaacgacgcctggcagccgctggtggcgctgttacggcaggggcaaacgctgacgctgctgtatggcagcaaagataccgagcacaatcagggcgtggtgctgcgcgagtttctgctggcgcagctgtagagattagcgttcccggcggtagctgccgtcggcctggcggcggaacagcgcctggctgttgtctgccgtggtgaccgacagcgcgctaatcacaccgttggcgtcgcgttcgatgcgcacttcctggccggctttcatgttgctcagcggcttgtcgccgccttccacctgtgccatggcgaacacttcattcaccggcagattgttgtcgcgaaacagttgggccagggtctggccgggctggatctgataacgctgccagttgcctgccagcgtcggttcgttggcaggcgtggcggcgctaccaccgttttgcagctcggcctgcagcggcacgctggtttcctgctgagagaccgggaacggctgtctttcgggcgagtagggccacagcaacgccagcagcagaatgatgccgaagatcagcacccagcggcgatgaaagtagggtagcggttccatccaatggaaaccgtccggcagatgccagactttaatcagcagcgctttgacccgctgcattttgtcgttggccgacggcggctccgatggcggttccgcgccttcagccgtgggtgcggcgcctggtttcaggcgctggctgatgttcagccaggtgcgcagcagcggctggtagatgcgggtggttttccttctcctgggcgcgattctgcccatggtgacctctcttcgacggcgtaataatcagtgcggcgcggcaaacgcgtcgcctgcccgatatcctgctttcagtatagtccgctaactgattgaagtgaaaggcggctgagcggcagagccggggtttgcggctgcgggcgttaacagaaggttattgtttctttttctacgacaaaagtcatcattctccacacaagattttacccggcattgacgcgctgttatgctgcgctttcgactttttacagacttaaggaaaaccccatgacaaccccttcttttgacagcgttgaagcgcaagcaagttacgggattggtttacaggtcggccagcagctgcaagagtccgggctggaaggtttgcaaccggaagctttgctggcgggtttgcgtgacgcgctggaagggaatgccccggcggttccggtagacgtggtgcaccgtgcgctgcgtgaaatccacgagcgtgcggacgcggtgcgccgcgagcgccagcaggcgatggcggttgaaggccagaaattcctggacgacaacgccaagcgcgatgacgtgacgctgaccgagtctggcctgcagttctccgtactggagcagggcaacggcccaattccgtcccgtcaggatcgcgtgcgtgtgcactacaccggccgtctgatcaacggcgacgtgttcgacagctcggttgaacgcggccagccggcagaattcccggtcagcggcgtgatcccaggctggatcgaagcgctgaccctgatgccggtcggctccaaatggcagctgtatatcccgcacaacctggcctacggcgagcgtggcgcaggcgcgtccatcccgccgttcagcgcgctggtgttcgacgtcgagctgctggaaatcctgtaatcccaccgaggattgttctgggcgccttcgtggcgcccttattttatgcgccgcgcagacgggcgatgaatggccgggcgcgccggccataaaccgtgttacttaccgcttaaatcgatgcgataaaccgcgaagccgatgctgtcgctgcctgcggcgctcatcggatattgggcgtgctctttgataaaccttgtcgctttgtccgaaggcgaggtctcgaagcggatatccagcggctgctggctgctgaagttcgccaaacgccagttgttgtccgcctgcgggcgcaccgcgccatgccgctgggtttcggcgctgatgtaggccgccagcaccgagcggttttcatccggcgaagcgaaggcgatatgttggtcgccggtgccggcaaatttgccgccgtaggcgcggtagttgttggtggcgaccaggaaggtggcgttcggatcgatcggcttgccgttgaaggtcaactgcttgatacgctccgccttgtcgttgatcagttggcattcgccgtcgtagcgcgccggctgactgacgtcgatctggtagttgacgccgtcgatcacgtcgaagttataggtacggaagccgtcccagttgatcaagccctgcggcttggcgctgttgacgtcgatctggttgaactgaccggcggagcactccagccactctttcacctctttgccgctcgccttcaccaccaccagcgtattggggtagagatagagatcggcggcgttgcggaaggtgagctggcctttttccacttcgacgaagctggcgggatcgttcttgcggccgccgaccttgaacggggccgccgccgacagcaccggcagatcggccaggtccgggtcgccctggatgtaatgttcgacgtaggctttctgcgcattgttgacgatctgcaccgtcgggtcgtcctgcaccagcgccaggtagctgtacatgttgccgtcggatttaccgatcggctggctgacgaactcgcgcgtgcccttgtgatcgtccgccaacactttcaccagcgcggcgtcttccgccgccagcgatttcttgttctctttgtcgtagatcggccgtgcttccgcgttggcggcggtcactttccagctgccgccatcgttgttgagctgcaggtcgaccacgccgagatgatcgccccattggcccggcatcaccgccggcacgccgttcagcaggcctttgtcgatatccgcgcctttgatgttggcaaagtccttgctcgggaacaccgcatgggcgtggccgaacatgatggcgtcgatgcccggcacctggctgaggtaatagaccgagttttccgccatcgccttgtaaggctcgctggacagcccggaatgagggatcgccaccaccagatcggcgccctctttacgcatctgcggcacgtagcgcttggcggtggcggtgatgtcgtccaccgtcactttgccctgcaggttggccttgtcccacaccaggatctgtggcggcacgaagccgatgtagccgatgcgcagcgtatgcgccttgccgtcgcgatctttcaccggcgtatcgacgatgatgtacggcgtgaacagcggtttttgcgttttggcgtcgatgacgttggcgttgatatacgggaatttggcgcccgcgatagcgttcttcaggtagtccagcccatagttgaactcatggttgccgatgttgccgacgacgtagtccagcgtgttcatcgccttatagaccgggtgcacgtcgcccggtttcagccccttggccgccatgtagtcgccgagcgggctgccctgaatgatgtcgccgttgtccaccaacaccgcgttggcggcctgctggcgcgcctgttggatcaggctggcggtgcgcaccaggccgaacttgtcggtcggtgtgtccttgtagtaatcgaagtccatcatgttgctgtgcagatcggtggtttccagcacgcgcagatcgacggtggccgcttgcgcggaggcgcacaccagcagcgcaagcgcggacagcgtcagtggatgcttcatcatttgggattctctccattccattattcgagtgttatcgcagagggaaatgtaattaacattgcttgccacagtaaactgtgaagtgtggcagaaaatggcggcgggtaacgcggggaagttcacagttgtgcccaacaagaaatgaggaattcccgaggcttaggcggttgagatggatattcggcgtaaaaaaaactagtctgctagcagagacagggggaaatttcccacggagatgcggagttgaggtgcatgatgttagagcgaatttgccaactgtcccgcgaggcgggggcggcgatcatggcggtgtacgatggtgaacaaccgcttgatgtcgcacagaaaaaagatgattcaccggtgacggcggccgatctggcggcacaccatatcatcaagcgcggcctggcggcgctgacgccggaggtgccgctgctgtcggaagaggatccgccggcgtgggaagagcgccgcggctggacgcgctactggctggtcgatccgttggacggcaccaaagagtttttacatcgcaatggcgagttcacggtcaatatcgccctgattgaagatgggcaggcggtgatgggggtggtgtatgccccggcgatcgacgtgttgtatctggcggagcgcggtaaggcctggaaagaagagaagggcgtgcggcaggcgatcggcgtcagcaacgcgcatccgccgctggtggtggtgagccgctcgcatatcgatgacgaactgaaagattatttgcagcagttgggcgagcaccagaccgtgtcagtcggttcctcgctgaagttctgtctggtggcggaaggcaaggcgcagctctatccgcgcttcgggccgaccaacatttgggataccgccgcagggcatgcggtggcggtggccgccggggcgcaaattcacgattggcagggtaagccattgctctataccccgcgtgaatctttcctcaaccccggcttccgggtgtcgctgttctgagttagttcgccaacagctggtgcagcttggacatcacctgctgcacctcttccggcgtcagcgcgccgtctttggcgaactggatgcgcccttgcttatccagcaccacgatggcggagcctttcggctgcagatcccaggctttgcgcacgttgccgtcgctgtcgacgataaactgcgaccatgggaactccttcttgctgtcttcaatgctgctgcgcacgaacatcgcggtgcccatcagggcatcgtcggtgttgacgattgtcgtcgtttggtaacgatcgtgtggtagcttcgccttcttgatcgcttcaatcagtgggtcgttcatgtctttggcggagctgcggccggcaatatgttgtatcactcgcacttttccactgagctgcgcgctgttccagttctggtagctaaaattaccgtcagtgtaattgagctctcctttgtcgctgacgccgaccggcgccacgcgctgctggagctggaagttgtgcgcggaagcgaaaagcggggcgagcagcagggataccatcagcatgcgacttgttttcatgctttctccttgtaatggggggaatttgtgcgacagcacttcgacagcctaaagcataggatgtgataagaggtctgtcctgttaaccggatcgcagattttcccttggttcgctaatcatcagattttgaagggatatcctgaaaacgttataaattatcatatacaattctgtcaaaaagtgtaaatccagcgtagatatccgggcagaagtgaacgttctggtctttactgggtctactacatgcaatcaagttgcgttctgaatttcgaggctgccacctttggcggctcgctgagcgcatggatcaacgggaggagcgtaaaagaatgagaatcttccagcgttataaccctttgaaagtggcaaagtacgttaagaccctgtttcgcggaaggctgtatatcaaggacgtgggcgcatttgaattcgacgaggggaaaatcctgccgccgaagattcgcgacaagcgccatttcagcgtgatgtctgaagtgaaccgtcaggtgctgctgttgcagaccgagatggggtgagcacctcgctgacagcggtaaaaaaaatgcggccccgatggggccgctgatgtttttgtcttaccgccgtcaggccgcaggcgtgtcgtccggcgctttcggcagcaccgccgccggcttgtcgctcagccgggtgaccagcaactggtctatcttgtagctgtcgatatccaccacttcgaacttgtagccggcgtatttgacgaagtcggtgcgtttcgggatcttgcgcagcatatacatcataaagccgccgatggtctcgtagttgcccgcctgcgggaactcgtcgatatccagcacgcgcatcacgtcgtcgatcggcgtgccgccttcaatcagccatgaactttcgtcgcgcgccacgatctgctcttcctggccctggccgaccagatcgcccatcagcgtggtcatcacgtcgttaagggtgatgatgcccaccaccaacgcatattcattgaggatcaccgcgaagtcttcgccggcggttttgaagctttccagcgcttcggacagcgtcagcgtgtccggcacgatcagcgccgagcggatctgcacgccgctgctcagcaccaggctttggttgcccagcacgcggttcagcaggtctttggaatcgacgtagccgaccacctgatcgatatggccgtcgcacaccaggaacttggagtgcgggtgagtcgagaccttctccttgatgctctcttcgctttcgcgcagatcgaagtacaccacgctttcgcgcgaggtcatcgaagacggcacggtgcgcgattccagttcgaacacgttttcaatcagctcgtgctcctgcttgcgcagtacgcccgccagggcgccggcttccaccaccgcatagatgtcatcggaggtgatgtcgtctttacgcaccatcggcagcttgaacatacggaagatcaggttggccatgccgttgaagaaccacaccagcgggcggaagatcatgatggagaaacgcatcgggttgatgatccggacggcgaccgtctctggtgcaatcataccgatgcgcttcggggtcaaatcggcgaacaggataaacaggctggtcaccagcacgaaagagcagatgaagctgacctgttccgccaattcgggcgacaggaaacgatcgaacaacaccttgaaagtgggcgagaaagccgcgtcgccgacgataccgccgaggatggccacggcgttcaggccgatctgcaccacggtgaaaaagatgccaggggtttcttgcagcttgagcactctggcggcgttgacgttaccttcgtcagccatcagcttcagtttgatcttgcgcgaggcggccagagagatttccgacagtgagaaaaacgcactcaccgcgatcagaaaaagaatcagtaaaatactgtttaacataatctatccatacgtgccgacgggatgccgacgctcttgaggaagggtagtacatagtaaaaaaagcagcgataacaaccagaagggaagctatcgggccgcagaagcggcccgcatagtatagcagttgccccacaggggccgccagcggttaaaaaagtgccgccggccggcatcaaatcagccctgcggcggcaggcaaacgccgatgccgcccagcccgcagtagccttccgggtttttgaacaggtactgctggtgatcgtcttccgcatagtagaacggcagcgctggtgcgatctcggtggtgatggcgcgcttatcgcccgccgcatccatcgcctgctggaagcgttgcaggctgctttccgcctcggtctgctgctctgggctcagcgtatagatcgccgagcggtactgcgtgccgacgtcgccgccctggcgcatgccctgcgccggatcgtgattttcccagaacagctgcagcagctgtttgtagctgacgacctgcggatcgaacaccacgcgcaccacttcggcgtggccggtctggccgctgcacacttcgcggtaggtcgggttcggcgtatagccgccgctgtagccggcggcggtgctgtagacgcccggctgttgccagaacaggcgctcaacgccccagaaacagcccatggcgaaaatcgccacctccatgccggccggcacctgagtcatcgagtgttcggtgacgacgttgagcgttgcgacaggcattggcgtggtgcggccaggcagcgcgcttgccttatcgacggtttgtgatttatcaaaaaatggcaccacggttgactcctgttgtcacagtaagaattgaccctacatggcggcggttcggttgtatctcaccgcgtctttgcccacaataagcggcaagttggattttgtataagcttaacgcagtattttgagcgccaaaagtgaagaattcgcctgttgcgcggtagtggcaaagcgcggcgggcggcgtccggaagaaggttgaagagggctgccgtcatgatagcgcggagtctgccctggccccggagcgaacaccataacaggacagtaaaatcaataaggagaacacgtgccaaagtacccggtcatgtgcttgatatctgtgttgcttgcggcacctgcagcctatgcggcgaacgtgcggctgcaggtggaggggttaagcggagagttggaaaaaaacgtccgggtgcggttgtcgtcgatcacgcctgaagaggtcggcaccgacggccgcttccgcgcacgggtggacgaggcggtgcgccaggggctgcgcgcgctcggctattaccagccgaccatcgagtttacgctggacgatcggccggggatgtcgcgcccggtgctgcatgccaaggtcaatccgggcgagccggtgcgcatcgccggcgccaacatcgtgctggaaggtggcgcaaagaccgatgaggactacctgacgctggtaaagaaggatcggccgaccatcggcgagatcctcaaccacggcaagtatgacagtttcaaaggctcgctgaccggcctggcgctgcgcaaaggctacttcgacgccgacatgaccaaaagccagctcggcgtggccgaagatctgcacaaggcgttttgggatatcgattttaacagcggcgaacgttaccgcttcggcaaggtgaaattcaccggttcgcaaatccgcgaagactatctgcaaaatctggtgccctttcatcagggggattactacagttcggaggatttggccgagctgaaccgccgtttgtccgccaccaactggttcaactcggtggtggtgtcccctgatttcaacgatgccaaagagaacaagattttgccgttggacgcgctggtgaccccgcgcacgcgcaacaccgtcgaaaccggtatcggttattccaccgacgtcggcccgcgggtgaaaggcacctggaaaaagccctggctcaacgatcgcgggcatagcctggaaaccagcgccagcgtgtcggcgccggagcagcagctggatctgacttacaagatcccgctgctcaagaacccgctggagcagtattacctgctgcagggcgggctcaagaacgtcgatcttaacgacaccaaatccgtgacctccaaagtggtggcctcgcgcaactgggatctctccagcggctggcagcgggcgatcaacctgacctggcgctgggataactttacccagggcaacgtcagcaacaccaccatgctgctgtaccccggcgtcagcttcaaccgcacccgttcgcgcggcgggctgatgccgacctggggcgacagccaacgctattccatcgacgtgtccgacacttcctggggctccggcgtggacttcgcgctgatgcaggcgcagaacgtctggatccgcaccttagccgacaagcatcgctttgtagcgcgcgggcaggtgggctggatcgaaaccaacgacttcgacaaggtgccgccggatctgcgcttcttcgccggcggtgaccgcagcattcgtggctacaagtacaaagacatttcgccgcgcggcgacgacggcaagctgaccggcgcttccaagatgctgaccggctcgctggagtaccaatacaacgtgaccggcaaatggtggggggcgatgttcgtcgattccggtgaagcggtgaacgatatcaagcagagcaacttcaagaccggcgccggcgtaggcgtgcgctggcagtcgccggtggggccggtgaagctggatatcgccgcgcccgtgggggacaaggacacccacgggatgcagttctacatcggtttggggcctgaactatgagcttggttaaaaagatttgcctcggatttctggtcattctgctgttgctgatcggcggcctggccttcctggtggggaccaccaccggtttgcatatggtcatcaacggcgcggcgcgctgggtgccggggttggagatcgccggcgtcagcggcggctggcgcgatctgacgctgaagggcgtgaagtatcagatgccgggcgtgacggtcaatgccgggcagttccatctctccctcgatctctcctgctttaaacgcagctcgctgtgcgttaacgccttgaccgctcaggacgtggacgtggcggtgaacaccaaagagatggcgccctccgcgccggtggaggagagcagtgaaccgaccaccaatctcagcaccccttatccgatcaccctgcgcctgctggcgctgaataacgtcaaggtcaccgtcgacgacaccgccatttctctggccgagttccgcaccggcgcgcagtggcaagagcgcgcgctgacgctgatgccaaccaagatcggctcgttgctgatcgccttgccgaaaacgccgcaaaatccgttgccggaagcggtgcaaccggcggtcgaggtggcgaaaaaggtcggtgagcaggttaccgacgcggcgaaaccggcgccgcagccggaggagaagccgctcggcgaaacgctgaaggaactgttcgccaaaccgctgttgccggatctgccggacatccgcctgccgctggatatcaccatgaaagagatcagcggcgaacagctgcgcttgaccggcgatactgacgtgctgatcacgagcctgttgctgcaggccagcacgcaggatcagcatatccagctggacaacttcgacgtgaagtcgccgcagggcacgctgtcggtgcaggggcaggcgaccctgaccggcgactggccggtggcgctgaccgccaacagcgcgttgaatatcgacccgttgaagggcgagaaggtgaagctgaacatcgacggcgggttgcgtgatgagctgaaggtggcgctgaacctgtccggcccggtcggcgcccagctcgatgtgcaaacccggctggccgaagccggcctgccgctggcgctgacgctgcagagcaagcagctgaaatggccgctgagcggcgaggcgcagtaccaggtcaacgatttccgcctgcgctttaacggcaaggcgaccgactatgcgctgtcgacgcgcgccaatctgaaaggccaggatctgccgccggcggtgctgacgctggacggcaaaggcaacgtcgagcagttcaagctggagcgcctgcgcctggcggcgctgcagggcaataccgatctcaccgcgctggtggactggagcaaggccatcagctggacctcgcaattgacgctgagcggcatcaataccgccaagcagtggccggaatggccagcgaaactcgacggcaagatcaccacgcgcggcagcctgcacggcggcagctggcagctgcaggtgccggtgctgcagctggacggcaacgtgaagcagaacaaggtcacggcgcgcggcacgctgagcggcaacgccgccgggcagtggaaaatccccggcatcgatctgacgctggggcgcaaccagctgaacgtcaaagggcagctggacgagaagagctggaacctggacgccaacatcgacgcgccgcgtctggacggcgcgctgccgggcctcggcggcaccgccaaaggactgctgaagctgcgcggcaatctgcaggcgccgcagctgctggcggatttgaccgcttccggtttgcagtggcaggcgctgcgcatcaaccgcgtgaagatcgacggcgacgtgcgttccacggatcagatccaggggcaactggcggtacgcgtcgagcagctgaagcaggacgcgctggaggtcagcctgctgaccctcgacgccaaaggcagcgagaagcagcatcagctgcagttgaagatcgacggcaaaccggtctccggccagctggcgctgcagggcagcttcgatcgtcagcagcagcgctggcgcggcaatctgaacaatacccgcttcgatacgccggtgggggagtggcgcctgacgcgcgccatcgtgctggactacctgaacaccgcgcagaagatcagcgtcgggccgcactgctggcagaacccgaacgccgagttgtgcgtgccgaagaccatcgaagccggccagagcggccaggccagcgtggtgctcaaccgcttcgatctggcgatgatcaagccgttcctcggcccggagaccgccctgagcggcgtgttcaccggccgggccgacgtcagctggaaaccgggcggcgcgctgccggaggcgaaggtcacgttggccggcaacggcgtcaaggtggtgcagcaggtgcagggcaatgcgctgccgatcgccttcgatacgctgaccctcaacgccggcctgaacaacggccgcgcgcaggccgactggcggatcaaactgaccaacaacggccagttcgacggcaatatccaggtggcggatccgcaggtgcggcgcaccatcagcggcaacgtcaatatcaccaacatttcgttggcgctgattaacccggcgctgatgaagggcgaaagcgcggcgggcatgctgaacgccaacctgcgtctgggcggcagcgcgcagaagccgctggtgttcgggcgtctggcgttggatcgggcgaaggtgcaaggacactggatgccgttcgatatgaccgacgcgcggctggcggtgaatttcaacggcatgacctcgacgctggaagggctgctcagcaccacgcgcggccagctgaatctggcgggcgacgccgactggcgtgacatcaatgcctggcgcgcgcgcattgccgccaagggcgacaagctgcgggtgacggtgccgccgatgatccgcatcgacgtatcgccggatctggtgttcgaagccacgccgcagctgttctcgctcaacggcaaggtcgatattccctgggcgcgcatcacggtgcaggaactgccggaaagcgcggtgggcgtctcttccgacgaggtgatgctggacgatcagctgaagccgattcaaccgaagaccgcctcgatcccgatcaacagcaatctgatgatccacgtcggcaacgacgtgcggctggacgccttcggcctgaaagcccgcctgaagggcgatttgaaagtggtgcaggacaagaaagggctgggcctcaatggccagattgacatcccttccggtcgcttccatgcttatggtcaggatttgatcgtgcgtaaagggcagctgatgttctctggcccgccggatcagccgctgctcaatatcgaggcgatccgcaacccggaatccaccgaggacgacgtgaccgccggcgtgcgcgtgaccggcctggcggatgcgccgaagctggaagtgttctccgatccggccaaatcgcaacaggaagccctgtcttatctgctgcgcggtcagggcttaagcagttccggcgccgacggcaacgccatgacgtcgatgttaatcggcatgggggttgcacaaagtggtcaacttgtgggtaaaatcggcgaggcattcggcgtgagtaatttggctctggacactcaaggggttggcgacaattcccaggttgtcgtgagcggctatgtcctcccaggcttacaagtaaaatatggggtgggcattttcgactcgctggccacgctgacgttgcgttatcgcctgatgcctaagttgtatcttgaagcggtgtctggtctcgaccaggcattagatttgctctatcagtttgagttttagcgatgcgaataattgtctacggcagtttacggcgcaaacagggaaacagccattggatgaccaacgcccaatggctcggcgagcacgagctcgaaggctatcagatttataatctgggccattacccggcggcgatccctggagagggcacgatacattgcgaagtgtatcgtattaactcatcgattctggcagagctggacgaactgaaaagcaacaccaaggactataagcgcgagctgattcagacgccttatgggagtgcgtggatctacctgtataaacacagcgtggacggttacccgcgaattaccagcggtgactggctgaaacgcctcgaagatcagtaataaaaaaacaccgctcaatgagcggtgttttttcatcggacggcggcgaaaattacttcttggcggcgcgttcgaaggaggcgatgatttccgctttagcggcagcagcgtctgcccagccttccactttcacccatttgcctttttccagatctttgtagtgctcgaagaagtgagcgatctgggctttcagcagttccggcaggtcgttcacgtctttcacgtgatcatactctttggtcagcttgctgtgcggtaccgcaaccagcttggcgtcttcaccggcttcgtcggtcattttcagcacgccaaccggacggcagcggatcacggagcccggctgcagcggatatggggttgggaccagcacgtcaaccggatcaccatccagagacagagtgtggttgatgtagccgtagttgcatgggtagaacatcgcggtggacatgaaacggtcaacgaacagcgcgccggtttctttgtcgatttcgtatttgattggatcggcgttggccgggatttcgattactacgtagatgtcttccggcaggtctttgccagctgggaccagattcaagctcatgtcggtttcctttaatcatcaaaccagaaatggagtggcggctattatagcggactcttttgcgatttcctgcccttttcatcgtcgaaaacccagtgtctctgcgcgcggagaatttccagattaatcccgccgcggcatgaagttttgcctccgcctgccgataacttcaacaaacaataatgagccagcaaagctggctccgcgttttgccacccctactacgtctgatctcactattctgaagccgggaagaactcatgctaaaaaagattacggtgaaggctgggctgatcgccctgctgagcctgatgaccatgctgctgatcatggtcagcgttattggcgtcaacgcgattaacgaaggatcgcgctcgatccataccttgaaccagatcctcggcgaagagctgggctcgctggccaacagctccaacctgacgctgcgcgcccgaaccgccgcttcgctggcggtgcgccaacgggagatcggccagactgatgtcgccgacgccaccgtcggccgcatctacggctacctcgagcagtcgaacaaggaaatggcgcgctttgtcggcgtcggcaccgtgaccgagcgcggccgcgaactctccaaccgcctgcaaaacagctatcgcgcctatctggagcagggcgtgaagccgatggccgccgccatcaaggccggtaaaatcgatgagtactaccatattcaggagacccgtatctctgcgttaagcatcgcgtttgaaaaggatctcagcgatttccgcagcttcgccatgaagctcggcgagaagcaggtgtatgacgcggaaagcaacgccagcaccaagatctcgctgatcgtggtggcgggcctgctcagcgtgctgctggcggtgctggcctggtttgcgttgcgggtgatcattttgcgtccgctggatgagtccatcgcgcagctggaatacatcgccggcggcgatctgacccatgagatccgcggcgagggcgataccgagatgggccgcctggtgcgggcgatgcagcgcatgcagcaggcgctggccaattcggtcagcaaagtgcgtgacgccagcagccagatcgacaccggttcacgcgaactggcggccggtaacctgcatctggcgcagcgcaccgaagaatcggccgcgtcgctggaagagactgccgccagcatggaacagctgacctcgacggtgaaaatgaacgccgagaactgcgagcaggctaatcagctggcgctgagcgtgtccgatatcgccaaccagggcagcgacgtggtcagtcaggtcatgagcaagatgcaggcgatcaccgacagctcgcgccgtattgccgacatcatcagcgtgatggacggcatcgccttccagaccaatatcctggcgttgaatgcagcggtggaggcggcgcgcgccggcgaacagggccgcggtttcgcggtggtggccggcgaagtgcgcaatctggcgcagcgtagcgcccagtcggcgaaagagatcaaagggttgatcgaagcgtcgcagaaccgggtgcaggaaggcgagcagatggtggagtcggcggcgcagaccatgagcggtatcaccggtgaagtgggccgggtgacggcgttgatgcgtgagatctcggcggcgacgcgcgaacaaagcagcggtatcgaacaggtgaatctggcggtggcgcagatggatcaggtggcgcagcagaatgcggcgctggtggaagagtcggcggcggcgacgcgctcgctggaagatcaggctcagctgctggcgcagagcatggcggcgttcaagctgtaaggcgataagggttcggcgcggcgccgaacccttgccagtaacgcgttactcgtccgggttttcggcgatgaagcgttctgcgtcttctaccatcgacttggtgccgacgaagaatggcgcgcgctggtgcagtttcaccggcgtgatgtccagaatgcgatttttgccgtcgctggccttgccgccggcctgttcggccaggaacgccatcgggttgcattcgtacagcaggcgcagcttgccttgcgggtggctggcggtgcttgggtagatgtagatgccgcctttcagcaggttgcggtggaaatccgccaccagagaaccgatgtagcgcgaggtataagggcgctgcgtcgcttcgtcctgctcctggcagtacttgatgtatttcttcacgccgagagggaacttgatgtagttgccttcgttgatggaatacatgttgccgctcgccgggaagcgcactttctcgtgagagagacagaacacgcccagagacggatcgtacgtgaaggcatggacgccgtaaccggtggtgtacaccagcatggtggacgagccgtaaaccacgtaacccgctgcgacctgggcgctgcccggttgcaggaagtcttcttcggtcaccggcgtgccgaccggcgtgatgcgacgatagatagagaaaatcgtaccgaccgagacgttgacatcgatgttggacgaaccgtccaacggatccatcaatacgacatacttggcattttcagctcgctcgccgtcgaatatcacgatttcatcttcttcttcggaagcgatacccgcaacttcaccgcgcgctttcaacgccgctttcagtttttcgttcgcgtacaggtccagtttcatctgaacttcgccctgtacgttggacaccccgctggttcccagaatatcaaccaggccggccttgttgatgtcgcggtggatgattttggcgcccagtttaattgcagaaagtaacgcggtcagctcgccggtggcgtgagagaagtcgtgctgtttctcgacgataaattcgcctaacgttttcatgacacaatccctgaatctacggatggatagcggcctgttaacaaaccgccaacgttttcgcgtgcagtgtagcccaaagatgcgcgccattcataggcaaatccatttcttctggacgattctgagcgttagaatatgccgacattcgatgcactcacatgagaaacctatgcgcattcacattcttgggatctgtggcacctttatgggcgggctggcgatgctggcgcgctcactggggcatgacgtcaccggttcggacgccaacgtctatccgccgatgagcacgctgctggagaaccaggggatcgatctgattcagggttatgatcccgcccagctggatccggcgccggatctggtgatcatcggcaacgccatgacgcgcggcaacccgtgcgtggaggcggtgctggagcgcggtatcccttacgtttccggcccgcagtggctgcacgacgccgtgttgcgcgatcgctgggtactggcggtcgccggcacccacggcaaaaccaccaccgccggcatggcgacctggatcctcgaggcctgcggctaccagccgggcttcgtcatcggcggcgtgccgggcaacttcgacgtctcggctcgcctcggcggcagcccgttcttcgtgatcgaggccgacgagtatgactgcgcgttcttcgacaagcgctccaagttcgtgcactacagcccgcgcacgctgatcatgaacaacctggagttcgaccacgccgatattttcgacgatctgaaagccatccagaaacagttccaccacctggtgcgtctggtgccgggcaaaggcaaaatcatcctgccggacaacgacagccacctgaagcaggtgatggcgatgggctgctggagcgaacaggagctggtgggcgaagagggcgcctggcgcgcgcagaagctgacgccggacgccagccattacgcggtgttcctcgacggtgagcaggtcggcgaagtgaagtgggcgctggtgggcgagcacaacatgcataacggcctgatggctatcgccgcgactcgccacgtcggcgtgcagccggcggacgcctgccgcgcgttgggcgatttcatcaacgcccgccgccgcctggagctgcgcggcgaagccaacggcgttacggtttacgacgatttcgcgcaccacccgacggcgatcctggccactctggccgcgctgcgcggcaaggtcggcggtacggcgcgcattctggcggtgctggaaccgcgatccaacaccatgaaaatgggcatcagcaaaaacgatctggcgccttcgctcggccgtgccgacgaagtgttcctgttccagccgcaccacattccgtggcaggtcgcggaagtggcggatgcctgcgtgcagccggcgcattggagcgcggatctcgacacgctggtggacatggtggtgaaaaccgcacagccgggcgaccacattctggtgatgagcaacggcggtttcggcggtattcacgatcgcttgctggacgcgctggcgaaaaagcaggaaccgaaggtgacctactgatcgcttagccgcataagccaatctaagggccgcattcgcggccttttttacgcccataaaaaagccctcgcgagcgagggcaacggggttcgtcggataggacgacgagagggtctctgggaaatcggcgtttgcgtcagaactcggcagtggcagtgacgagggtaatcagctctgcaaagccgttcccagagttgttatttgtaaatctcggcggtggcgtggtagttgccttcgttacgggcttcgatcacgcggtaggcggtcgcgcctttcgcgtcggctttctccgacaacgcctggcgaatgtcggtcggcgcgccgtcgatgccgctgacggtaatggtgccgatagattgcagattggcggtctgatcgttagtcaccaactgggcggcagacgcgccgaaggagatgacggataacaaaccgagtgcagcaacagtagttttcatgttcatgatagcgatccttggtcataacagcctggaagggcttggcagcgatttttattcttgaaggccgttatgacagcgtttgattccagagatgtattgcccgttgccgggtaatgccgttacttatttgtagatttcagcggtcgcgtggaagttgccgtcgttgcgcgcttcgatcacgcggtaagcggtcgcccctttggcgtcggctttgtcggacagtgcctggcgaatgtcggaaggcgcagcggcgacgccgctcacggtgatcacaccggcgggctgcagttttgcggcttgggttgcatcaacagattgtgctgcgaatgcaccaaaggaaagcatggacagaacgctcagggttgcaacggtagctttaattttcatcatctcacctcatcgtattcttttatcagttccaacgaactgtgattcagttcacgaaaatgagtatacagctagtaacgcgaaaaattaatagttcgctaacagttgctagtgaaactttaacctcatgatccttattttttataaccgtaaggaataaaaaacgctcataaaacgatcttttgatgttaaatttatgtaatttcaataaggtaagtgattttgaccaaaagtgcggaagatcacagtgggtactgctggttacatggagatgtcatggaaatgtgttgttgcgggataaaaaagcagtgttaaacgcggttgaaggctgggaaggtaacgcgagggttaaagaagcgctaacaacatgcggtttacagccgcactttgttagcgccaggtttcacagctcttgttcgaacacgcccaagatcgcttcatgcagcttctgagcggtaaagccgttggacggggtgacgaaaatcgtgtcgtcgccggcaattgtgccgaggataccctgggatttacccagtgaatcgagcaggcgggcgatcagctgtgcggcgcccgggctggtgtggatcaccacgacggcatcgttatggtcgacgtcgagcaccagattcttcaatgggctggtggtggtcggcacgccgagttcggcaggaaggcaatacaccatttccatttttgcattgcgcgtacgtaccgcgccgaacttggtcagcatgcgcgatactttggattggttaatgttttcgaagccttcttcttgcagcgccaaaacgatctcgccttgagaactgaatttttcttctttcaataacgctttgaacgtcttgatcagatcttcctgttttgcgggattacgcattttgcaccgtggaatgttgatagtggaagtcatgattatgcatatagatgaatttttatgcaacaaaggccgccccaaagaaaataaaaatgaccggacggcgaggaaagggcggcattttaacaaaatccggccgcgatgaatatgcccttttgacgacggaaaatcggcctgcggtggtaaataaaatgttattaaaatgatgttgttctgatgttgcgtaagggtgtaatgtaacggccggttaacttgctcgtgaataacctcgcactttttttgattagtgtgcgctatgcccttcatgcgtaagcgatttaatctaaaatgggcgcgacagcggccgttttattacacctgcaggcaagaattggctaatttattgttttgaaaggtgtaataacgtaaggtccgtaaccaacacattcacggcgctttatatatttaagataataaaggagtataggatgaaagttgcagttctcggtgctgctggcggtatcggccaggccctcgcccttctactcaaaacccagcttccttcaggttctgaactctctctctacgacattgcccccgttaccccaggcgttgccgtcgacttaagccacatcccaaccgcagttaaaatcaaaggcttcagcggcgaagacgcgactccggctctgcacggtgcggacgtggtgctgatttccgccggcgtggcccgtaagccaggcatggatcgctctgacctgttcaacgttaacgccggcatcgtgcgtaacctgattgagcaagtggcgaaaacctgcccgaaagcctgcatcggcatcatcaccaacccggttaacaccacggtcgccatcgcggcggaagtgctgaaaaaagccggcgtttacgacaagaacaaactgttcggcgtgacttcgctggatatcatccgttccaataccttcgtggccgagctgaaaggcaagcagcctgaagaactgaacgtgccggtgatcggcggccactctggcgtgaccatcctgcctctgctgtcgcagatccctggcgtgagcttcaccgatcaggaagtggcggatctgaccaaacgtattcagaacgccggcactgaagtggtggaagccaaagccggcggcgggtctgcaacgctgtccatgggccaggcggccgcccgtttcggtctgtctctggtgcgtgcgctgcagggcgagaaaggcgttgtggaatgcgcttacgttgaaggcgacggcaaatacgctcgcttcttcgcgcagccgctggtgctgggcaagaacggcgttgaagaacgcaaagatatcggcaccctgagcgccttcgagcagaaagcactgaacgagatgctggacgtgctgcataaagatatcgaactgggcgagaagttcatcaataactgatcgacaccgatagtcagccgataaacgccgccggacgctgttccggcggttttttttgctccgcgttcacgatttgatgcgtgctttgcgatccagcaggcaatcgctgtgcggatcgtaatagcggcttggccagatctccgaagggtggatgcctatcgcttcggcgatcagccattccccctttggccacgggcgcgacagcgcattggccagcgtcgatgagcttaatccggccttgcgcgacactgccgccagcgtggtgccctgcttgcgtagcgccgcgatgatatctgccggatgccaatctgggttccttgaattcatgtttacattccttttctgattagccaaagttgcgttagtggtataactaacgggtcatggttaagcgtttgaacaacgtgaaacgcttattaggaaacaagaataccattaaatttcctaaaaaatacccaagtaatttccaaaaaacgacattgtccactattgcccagagatgatggctatgaaaaacgagtggtttgccgccaaggaactgacaggcatcgcaggattaccctcctcaccacagggaatcaatctgatggcccgacgcgaaggctggatcagccgcaggcgtaaaggcgtgcagggaaaagcgttggagtatcatatcgacagcctgcctccaggcgtgcgtaacctgctggcgctgaaagaagacggggcgacatatgacgtagaacgccaggatccgttggcggtctggatcgagtattactaccatttgacggagagcgagcgcgagaaaatggtggctttcctgatgcgggaagggattggcggcctgctggcgcgtatcgacgaagagagcaatacctaggcaggcccgcgtgggcgggcctgatgaatgtattgcgaaattaaaatttcttaaaagtcgcgttgcactgccagatgcgccaggccttccagcgccgtgcggtgctccgaggccggcaagacctgcagcgcggcgatcgccttgtcggcttcttcctcggcgcgttggcgggtgtattccagcgaaccgcattgttgcatcgcctgcagcaccggctccagcaggtggcggccgttaccttgctcaatcgcgccgcggatcatgtcacgctgggcatcgtcgccgttgtgcatcgcgtgcagcagcggcagggtcggtttcccttcattcagatcgtcaccggtgtttttgcccagggtgctgccgtcggcgctgtagtcgagcagatcgtcgatcagctggaaagcggtgccgaggtagcggccataatcttgcagcgccttctcttgctcggcgttggcgccggacaggatcgccgacgattgcgccgccgcctcaaacagacgggcggttttgctgtagatcacccgcatatagctttcttcgctgatgtcaggatcgtgcacgttcatcaactgcagcacttcgccttcggcgatgacgttgaccgcctccgacatcagcgccagcacgcgcagcgattccaggctggtcatcatctggaaggcgcgggtatagataaagtcgccgaccagcacgctggcggcgttgccgaacgccgcgttggcggtggctttgccgcggcgcatatccgactcgtcgacgacgtcgtcatgcaacaacgtggcggtatgaatgaattcgatcagggcggctacggtgacgtgcttgttgccttcgtagcccaacgcccgcgccgccaggacggcgatcatcggccggatgcgcttaccgccaccgctgataatgtaatagccaagctgattgatgagcgtgacatcggaattcagctgttcgagaattgttgcgttcacggccgccatatcttgcgcggttaactcggtaatttgctctaggttcattgtgtttttttcagctgtgtttctcttcaccgcgttgagatcgctgctcacatcggtacatggcggtaactgtccctatgattgtacttgaaaaacggttcagataaacgccacgaaagaaactgcgctttttttcttcttttttctccttctggtcttattctgctcttgtcatgcgccgcttttttgcgtagaattcgcgccctattgtgaatatttatagcgcgctctgaactaacacagtcgggcacgcggaaagcggagttttatatgtacgcggttttccaaagtggtggtaaacaacaccgagtaagcgaaggtcagaccgttcgcttggaaaagctggacatcgcaactggtgaagcggttgagtttgaccagattctgatgatcgctaatggcgaagatatcaaaatcggcgttcctttcgtcgatggcggcaagatcaaagctgaagtcgttgctcacggtcgtggcgagaaaattaaaatcgttaagtttcgtcgtcgtaaacaccaccgtaagcagcagggccaccgtcagtggttcactgacgttaaaatcaccggcatcagcgcttaagttaggagagcggattaatggcacacaaaaaggctggcggctcgactcgtaacggtcgcgattcagaagctaaacgtctgggcgtaaaacgctttggcggcgaagcagtactggcaggcagcatcatcgttcgtcagcgcggcaccaaattccacgctggtaccaacgtgggttgcggcaaagaccacactctgtttgctttgaaagacggtaaagtcaaattcgaagttaaaggcccgagcaatcgtaaattcatcagcatcgaagctgaataatttttcgagccttacgaaatagatgtaagccccgcaattcgttgcggggctttttacatttatgggttgcctgagggttggcccgtcagcgttggcgaaggtgatatggatacgaagcagcaggtcggcgttggtatttctttggcgttaaccacggcggtttgctggggcgcgttgccgatcgcgatgaaagaagtgttggtggtgatggagccgtttaccgttgtctggtatcgctttaccatggccgccatcggtttgggcctgatccttgcggtgcgccgcaagctgccgccgctgacgatgttccgccagccgcgttggctgctgctgttggcgatcgcgacggcggggctgctgggcaactttgtgttcttcagctcctcgctgcaatacctgagcccgacggcgtcgcaggtaattggccagctgtcgccagtcggtatgatgttcgccagcgtgctgattttaaaagaacgcatgcgcatcacccaggtcattggcgccctgatgctgatttgcgggctgatgctgtttttcaacgtcagtctgatagagatcttcacccggctgacggactacacgctgggcgtcatgctgggcgtgtgcgcggcgatggtctgggtgagctatggcgtggcgcagaaggtgttgctgcgccggctggcttcgccgcagatcctggttatgttgtacactttatgtgcgattgcgttgttccctctggccaaacccgaggtgattttccagcttagcggctggcaattggcgtgcctgctgttttgcggcgccaacacgctgatcggctatggcgcgctggcagaagcgatggcgcgctggcaggcggcgcaggtgagcgcgttggttacgctgaccccgctgtttaccctgctgttttcagatttattggcgctggcttggccccaggcattcgccatgccgacgctgaacatcgtcggctatgtcggtgcgtttgtggttgtggcgggcgccatgttttccgcaattggtcaccggtggtggccgcgacgggcagacccccccctggttgctcctttgaagcagcccggtgaatgatttacggagacggtaaatgaagtttgtagatgaagcagcgattctggtcgttgcaggcgacggcggcaacgggtgcgtcagcttccgccgcgaaaaatatatcccgaacggtgggcctgacggcggtgacggcggcgacggcggcgacgtctacctgctggcggacgagaaccttaacaccctgatcgactaccgctttgagaagtctttccgcgccgaacgcggccagaatggccagagccgcgactgtaccggcaaacgcggtaaagacgtcatcatcaaggtgccggtcggcacgcgcgtgaaggatcagggcaccggcgagatcctcggcgacatgacccgccacgagcagaagctgatggtcgccaaaggcggctggcacggtctgggcaacacccgtttcaaatcttcggtcaaccgcgcgccgcgtcagaagacgctgggtaccgccggcgaagcgcgtgacctgttgctggagctgttgctgctggccgatgtgggcatgctggggctgccgaacgccggcaaatcgaccttcatccgcgcggtgtccgccgccaagccgaaggtggccgattatccgtttaccacgctggtgccgagcctgggcgtggtgcgcatggatcacgagcagagctttgtagtcgccgacattccggggctgatcgagggcgcctccgaaggcgccggcctgggtattcgtttcctgaaacacctggagcgttgccgcgtgttgctgcacctggtggacatcgcaccgatcgacgaatccgatccggtggaaaacgccaaagtcatcatcaacgagttgaaccaatacagcgaaaatctggcgcagaagccgcgctggctggtgttcaacaaaattgatgtgattggtgaggaagaagccgccgaacgcgccaaggcgattgtggaaggcatgggctgggaagggaagtactacatgatctccgccgccaaccgtgaaggcgtcaacgcgctgtgctgggacgtgatgaacttcatcaacacccagccgaaagcgatggcgatcgaagaaagcgcaccggaaaaagtcgaattcatgtgggatgactaccaccgcgagcaaatcgcggaagtggaagccgaagcggaagatgactgggatgacgactgggacgaagacgacgacgaaggcgtcgaaatcatttaccagaagtaattcggtgataaagggctcagcaacgctgggcccttattatttgagcgccttttccggcatccagcactgggcattcaggccgcgcgcatcgcggcggttttccagcgtcaaacgcccctggtgcagttgcgcgatgcggatcacgatattcaggcccagtccgctgccgccgtagcgttgatccatgcggcgaaacgcctgcgtcagctccccgaccatttcttccttgattcccgggccatcgtcgatgacctgcagcagatagccgttgtcttgcggcgttaaccgcacctgtatcgcgccgccttccgggccgtaacggtgggcgttttcgaccagattgcgcagcagcagccgcagcagcaccggatcgccgttcactgtggcagcagccggcaattgccagcccagcgtctgcccgcgttgggcggccatttcgtcgagctcttcgcgcagcggctggatcacatcggccacccaatcgaaatgctgataatggccgctggcgaagtcttgcccggcgcgcgacagcatcagcaactgctcgacggtatgcatcagctgatcgatgcgggcgatcagcgcctggctgcccttgacgccctgtttttccatcaattccagatgcaggcggatgccggccagcggcgtgcgcagttcgtgggcggcgtcggcggtgaacaggcgttcctgttgaatggtgttgtccaaccgtgagaacagctgattgagcgcattggtgacggccaccatttcctggctatcgctggtgatcggcagcggcgtcaggttatcggcagagcgcttttccagccgctgttgcagttggttgagtgggcggatgatccagctgatagcccagaatgacgccaacagggtgacgatcatcatgatcagcgaaggcgccaacagcgatgcgatggcctcggcgatctcggtatcgacgcgttcggtacgcactttggcggacagggtttcgtccaccaggaagctgatctgctcctggctttcgtgccacagccagaaggcgctgatgagttgcgtgaccagcaggatcagcgccagcatcagcagcaggcggcggcgcatgctgatcatgacgagggttccaggcggtagccgatgccgcgcacggtgcgaatgcgatccttgcccagtttgcggcgcaggttgtgaatatgcacttccagggtgttggaacctaaatcatcttgccaggtgtagagatcctgctgcaggagttcgcggttgaccgtctgcccggcacgcatgatcaggcgcgccagaatggcgaactctttcggcgtgacctccaccggctgctgttgcagatagacctgctggctggagagattcaactgcaggtcatccacctgcatcagattgtcgctgtggccctggtagcgccgcaggagagcgcgcacgcgcgcctgcagctcaaccagcgcgaagggtttgaccaggtagtcgtcggcgccggcgtccagcccatcgacgcggtcttccagggcgtcgcgggcggtcaggatcagcaccggcagatcgatctgctggcggcgccactgccgcagcagcgctgcgccgtccatgtccggcaggccgagatccaggatcaccatgctgtattggctggtgatgagcaggctgctggcctccgccgctgtggcggcgcagtcgcacacgtagccttcaccggtcagcgccagcgccagcccttgttgcagcagttcatcatcttcaacgaccagcagcttcatggcgatcctcagttgttttggtaaatatcccgatacaggcggctttcgaaacgcaccagcggtgcgcggcgctgtttctgatcttccggcggcacggcgtagccggagagatactgcacgaaggccatgcgctggccgctggcggtagtgatgaagcccgccaggttgtagacgccctgcagcgcgccggtcttggccgacaccttgccgtctacgccagcctcatgcaggccgccgcggtagcgcagggtgccatcatagccggacagcggcagcatcgagataaagttcagctcgttgtcgtgctgcgcgatgtactgcagcgcctgcatcatggtcgccggggccagcaggttgtggcgcgacaggccggaaccgtcggcgatgatggtgttgcccagatcgatgccggccttctggcgcagcacctgccgtaccgcatcggaaccggctcgccaggtgcccggcacgccgaagcgttcgtggccgatggtgcggaagacggtatcggcgatcatgttgtccgatttcttcagcatgattttcaacagatcgtgcagcggcgccgactgggtttgcgcgatcaccgtgccggtgatgccggggcgcgtctggcgtttcaaatgcccgtcgatctggatgtcggcctgcttcagctcgtctttcaggatggcgcccgcatagctggcgccgtcctggatggcgaaggccagcggcaacggctcgctgcgctgcgtcaggcagccggtcagggtaaagcggttcagctcgcccggcaccacatccagctcgcagtactgcgcgtctgcggagccgcgcgccagggtgcgcacctggctaaacatattaaccggataataggaggcgacgcggataaacgccatgtcgcccggattcggcgcgctgtacagcgagaccgagaaacagttgcgatcgacaatggcggcggccggcggcgcgctgaagcactgcgtcagatcgttccacggccagccgggcgccttgtcatggctggcgaagaccgaggtatcgaccagcacgtcgccgctgatttggcgcacgccctgcttcttcaggacggccaccatattgcgcaggctctggcgtttgaaggtcggatcgccgctgaagcgggcgatcaggttgccgcgcagcacgccgtcgcggatatcaccctggctctccagcgtggtggtgaaacggtaatcgggcccgagttgcagcaatgccgccagcgccgtcagcactttttgggtactggccggcagcgccatttgctgagagtggtaatcgatcgtcggcgcaccggcgccgatcttctgaacgaccagggcaaggttggccccatcaggcagatattgtgtgtactcttcaaccggggccgcattcgcattcagaacaaatgcgcaagccaatgcactgacaattcgtgaaaaacgcataatctcgggataacagctggataacgtgccgtcatactacggtgcaatcagggaaaaagtaaacgatgaccctcaaggaactctaggctaaaatgcgtatcaaaatgcaaaaccgatcttggcttgggctccgttccgagtcaggtttcttttgtttgtcgcctggaggcggggggcggtatgccaaccgtgttttcatacgaatacgtcaggatgacggttatttgaacaggaaagatttagaggtatttatacgatgaaccaaattccgatgaccttgtttggcgctgaaaaactgcgcgaagagctcgaatatctgaaaagcgtgcgccgcccgaaaatcattgcggatatcgctgaagcgcgtgaacacggcgacttgaaagaaaatgccgagtaccatgccgcccgcgaacagcagggtttctgcgaaggccgcattcaggaaatcgaagccaaactgtccaatgcgcaggtgatcgatatcaccaagatgccgaacaccggccgggtgatcttcggcgccaccgtatcggtgatgaatctggacagtgaagaagaagtgacttaccgcatcgttggcgacgatgaggccgatttcaagaaaaatctgatttcggtaaactcgccgatggcgcgcggcctgatcggcaaagagcaagacgatgtggtggtgatcaaaaccccaggcggcgacgtggaatacgagatcctgaaggtcgagtatctctgatcgggaccattggtcattaatgcgccaacgttttgtaaagataggaaaaaggccgcaagcggccttttatcttggtcaggcgcatggcaccttttcgttaacctgatggttattaacgcggtagactgatcttgcgctctttcgacgggcggtaaagaataagcgtactgccgataacttgcacattgcaggcgcccgtttcacgcacgatagcgtcggcgatcagggtcttggtttcgcgatcttcagcggcgatttttaccttgatcagctcatgatgctccagagcctgttcaatttcagccagcaccccttcggtaagaccgttattgcccagcatcaccaccggttttaacggatgcgccaggcctttcaggtgctgtttttgtttattattcagattcattgtcttttttgcttaagttgggattgaaaacggtacattctaccgccatctcatgtatatcaccaaatcggtcttcaccggtgtgagtctacgtgagcagcgaccctgacataagactctttttatgatagttggaaaacgagatggctaataaaaagcgttcggctagctccagtcgctggttacaagaacactttagcgataaatatgtacagcaggcgcagaaaaagggactgcgttcccgtgcctggtttaaacttgatgaaatacagcagagcgacaaactgttcaaaccaggcatgaccgtggttgacctgggcgccgcaccgggcggctggtcgcagtatgtggtcacccaaatcggcggtaccgggcgcatcatcgcctgtgatattttgccaatggatcctatcgttggcgtcgatttccttcagggcgattttcgtgatgaactggtgctgaaggcactgttggaacgagtaggcgagagtaaggttcaggtggtcatgtccgatatggccccgaatatgagtggcaccccggcggtcgatattccaaggtcgatgtatctggtggagttggcgctggatatgtgtcgtgatgtcctcgcaccaggcggaagtttcctggtgaaggtgttccagggagatggctttgacgagtacctacgggaaattcgctccctgtttacgaaggttaagattcgtaagccagacgcttcccgcgcccgttcgcgcgaagtgtacattgtagcgacagggcgcaaactgtagtaccctaacgctgtttgttaacacagttgtaagatgaggttaatcccttgagtgacatggcgaaaaacctaattctctggttagtcatcgcggtagtgttgatgtctgtattccagagctttgggcccagcgagtcgaatggccgtagggtggattactctaccttcatgtccgaactgacccaggaccaggttcgcgaagcgcgaatcaacggacgtgaaattaacgttaccaagaaagacagtaacaaatacacgacctacatccctgtcaacgatcctaagttgctggatacgttgttaacgaagaatgtgaaagttgtcggcgagccgcctgaagagccgagcctgctggcttctatctttatctcctggttcccgatgctgttgctgatcggggtctggatcttctttatgcggcaaatgcagggcggcggcggcaagggcgcgatgtccttcggcaagagcaaggcccgcatgctgacggaagaccagatcaagaccactttcgccgatgtcgccgggtgtgacgaagcgaaagaagaggtgagcgaactggtggaatacctgcgcgaaccgagccgtttccagaagctgggcggcaagatcccgaaaggcgtgctgatggttggcccgccggggaccggtaaaacgctgttggcgaaagcgatcgccggcgaagcgaaggtgccgttcttcaccatttccggttccgacttcgtcgaaatgttcgtcggcgtgggcgcatcccgcgtgcgtgacatgttcgaacaagcgaagaaagccgcgccgtgcatcatcttcatcgatgaaatcgacgccgtcggccgccagcgtggtgccggcctgggtggcggtcacgatgagcgcgagcagaccctgaaccagatgctggttgagatggacggtttcgaaggcaacgagggcatcatcgtcatcgcggccaccaaccgtccggacgtgcttgaccccgcgctgctgcgcccgggccgtttcgaccgtcaggtcgtggtcgggctgccggatgtgcgtggccgtgagcagatcctgaaggtgcacatgcgccgcgtgccgttggctgccgacatcgacgcctccgtcattgcgcgcggtacgccgggcttctccggtgccgatctggccaacctggtcaacgaagcggcgctgttcgccgcccgcggcaacaagcgcgtggtgtcgatggtggagttcgagaaagccaaagacaagatcatgatgggtgcggaacgccgctccatggtaatgaccgaagcgcagaaagagtcgaccgcgtatcacgaagcgggccacgccatcattggccgcctggttcctgaacatgatccggtacataaagtgacgatcattcctcgtggccgtgcgcttggcgtgaccttcttcctgccggaaggggatgcgatcagcgccagccgtcagaagctggagagccaaatctccaccctgtacggcggccgtctggcggaagagatcatctacgggccggaaaaagtctctaccggtgcgtcgaacgacatcaaagtggcgacctccatcgcccgcaacatggtgacccaatggggcttctccgagaagctggggccgctgctgtatgcggaagaagagggtgaagtgttcctgggccgctccgtggccaaggcgaagcacatgtcggatgaaaccgcgcgtatcatcgaccaggaagtgaagtcgctgatcgaacgcaactacacgcgtgctcgctcgctgctgatggaaaacatggacatcctgcactcgatgaaggatgcgctgatgaagtatgaaaccatcgatgcgccgcagatcgacgatctgatgaaccgcaaagacgtgcgtccgccggcgggctgggacgatgcgaacaaaggcaacagctccgacaacggcggcaccccgaaagccccgacgccggtagatgagccgcgcaccccaacgccgggcaacaccatgtccgaacagctcgacaagtaacaacggctgtgtaataacatcaaaccccggtacgccggggtttttttttgcccggcgggcagtgaaccaggcaacagtaaggtggaccaaccatgcagttaaccgtgcgcgacatgacgctcaatctctcccatccgcaggtgatgggcatcctcaacgtgacgccggattcgttttccgacggcggccgccacaacaccctgaaccaggcgctggtgcatgcgcatgcgctgatttcggccggcgccacgatgattgatatcggcggcgaatcgacaaggccgggggcggcggaggtgagcgaagaggaagaattggaacgggtcgtgccggtggtggaagcgctggcgcagcgcttcgaggtctttatctcggtcgatacctcgaaggcgggcgtgatccgcgaatcggcgcaggccggtgcccatctgatcaacgacattcgttcgctgcaggagccgggcgccctggcggcggcggcggaaagcggcctgccggtctgtctgatgcacatgcaggggcagccgcgcaccatgcagcaggcgccgcactacgacgatctgatcgccgacgttcaggcgtttttcgaacaccatatccggcgctgtaacgaggcggggataacaaatcagaaattgctgctcgaccccggcttcggtttcggtaaaaatttgtcgcacaactatcagcttctggctcggttgtcggagtttcatcgttttggtttgccgctgttggtcggcatgtcgcgcaaatcgatgattggacaactgctgaacgtgccgccggatcaacgggttatcggcagcgtggcctgcgcggtgatcgcggcgatgcagggtgcgcagattgtcagagtgcatgacgttaaagaaaccgtcgaggcgatgcgtgtcgtcgaggcaacactttcagctaagggacagtagagacatgagcgagcgcaaatattttggcaccgacggcatccgtggcaaggtcggggacagccccatcacgccggacttcgtgctgaagctgggctgggcggccggtaaagtgctggcgcgtcacggttcccgcaagatcatcatcggtaaggatacgcgcatctccggctatatgctggagtccgctctggaagccggtctggcggcagccggattgtccgcctccttcaccgggccgatgcccacgccggcggtggcttatttgacgcgtaccttccgcgcggaagcgggcattgtcatttccgcttcgcataacccgttctatgacaatggcatcaagtttttctcgatcgacggcgccaagctgccggacaatgtcgaagaagcgatcgaggccgagatggaaaagccgctgacctgcgtggagtcctcggagctgggtaaagccagccgcatcatcgacgccgccggccgctatatcgaattctgcaaaggcaccttcccgagcgagctgagcctgaaagggctgaaaatcgtggtcgactgcgccaacggcgcgacttaccacatcgcgccgagcgtgctgcgcgagctgggcgctacggtgatcgccatcggcgttgagccggacggcatgaacatcaacgagaaatgcggcgctaccgatgtgcgtcagttgcaggagcgcgtgctgcaggaaaaagcgcacgttggcctggcgttcgacggcgacggcgaccgcgtgatgatggtggatcacctgggcaataaggtggacggcgatcagatcctgtacatcatcgcccgcgaaggcctgcgccagggtcagctgcgcggcggcgcggtcggcaccctgatgagcaatatggggctggagctggcgctgaaacagctgggcattccgttcgctcgcgccaaagtgggcgaccgttacgtgctggaaaagctgcaggagctgggctggcgcatcggtgcggaaaactccggccatgtgatcttgctggacaaaaccaccaccggcgacggcatcgtggccgggttgcaggtgctgaccgccatggtgcgtaaccacatgagcctgcatgacctgtgcagcggcatgaagctgttgccgcagatcctggtcaacgtgcgtttcgccggcgatcacaatccgctggagtccgaagcggtgcgcaaggtcaccgaacaggtggaagccgagctggccggtcgcggccgggtgctgctgcgcaaatcgggcactgaaccgctgatccgcgtgatggtggagggtgaggacgagcagcaggtgaccgcgctggcgcatcgcatcgccgatgcggtgaaatccgcaggttaaaacagacagttagccgccgggcttggcatcgctgagcccgaacaggcgattgttggcgtttttttccgcaaacgcgccggcggctgcaaattgcccttgcgcgggttggcggctttggttagtattcacacccgcttcagtaggcagtttataaacacgcctgcttgatgagtgtgaagcatttggcatgcggtgaggccgcaaggatacgggtactactatgtacgaagctcttctggtaattttcctgctgatttcaatcgggctggttgctctgattatgttgcagcaaggtaaaggcgctgatatgggagcctctttcggagcaggtgcatcaggcacgttgttcggttcgagtggttccggtaactttatgacccgcatgactgctgtattggcgacgctgttcttcgtcatcagcctgattctgggcaacctcagcagcaaccaaagcaagaaaggcagcgagtgggaaaacctcggtcagccggtgaaaactgagcagacaaccgcgccggcagcacctgccaagccgagcagcgacatcccgcagtaagccgcaaaaagtttgtaaacggtggttgtgaactcgaaagaacaacggccgttagcagtaagaatcagtaccgaggtggtggaattggtagacacgctaccttgaggtggtagtgccctaacgggcttgtgggttcgagtcccatcctcggtaccaaatcccagagataacttgcaattttgcgattatcggcgtagtatttgccacgttttcggacgcggggtggagcagcctggtagctcgtcgggctcataacccgaaggtcgtcggttcaaatccggcccccgcaaccactttcctttaagtgtttattttcaaatacacttttcgattgaaatccgcttttctcgatcaacatttgaaaatgacacttgctcgaaagttgtaccgaggccgcctagcggcaaacagggtccagttgcataaagccccgatttttcggggttttttgttatttggcaacagaatcactgggctatttagccctttttttatgtcttgggggtgggcttgtccacattagagcaacagttaacagagatgctttcggcacccgtagaagcgttgggctttgagcttgtaggcatcgaattcattcgtgcgcgccaatcgacgctccgcatctatattgatagtgacaacggcatcaatgttgatgattgcgctgatgtcagccaccaggtcagcgctgtattggacgtcgaagatccaatcacggtcgcttacaacttggaagtctcctctcctggccttgatcgcccgatgttcaccgcagagcactatacgcgtttcctcggtgaagaagtcagcctggtcctgcgcatggcggtacagaaccgtcgcaagtggcagggtattatcaagtctgtcgaaggcgagatgatcacggttactgtggaagggaaagatgaagtgttcgcgctgagcaacatccagaaagcgaacctggtaccccacttttaaagtttggaagaggcaactaggatgaacaaagagattctggctgttgttgaagcagtttccaatgaaaaatcccttccgcgcgagaagattttcgaagcgctggaaactgcattagccaccgcaaccaagaaaaaatacgagcaggaaatcgacgtgcgcgtcagcattgaccgcagaaccggcgatttcgataccttccgccgttgggtcgccgtagacgaagtgacgcagccgacgcgtgaaatcacgctggaagccgctcagtttgaagatccgagcatcgagctcggcggctacgtcgaagatcagatcgaatccgtaaccttcgaccgcatcaccacccaaaccgccaagcaggttatcgtgcagaaagtgcgcgaggccgagcgcgcgatggtggttgacgctttccgtgaacatgaaggcgagatcgtcaccggcgtggtgaagaaagtgaaccgtgacagcatcgcgctggatctgggcaacaacgccgaagcggtgattggccgtgaagacatgttgccgcgcgaaaacttccgtccgggcgaccgcattcgcggcgtactgtacgccgtgcgtcctgaagcccgcggcgcgcagttgttcgtcagccgttccagcccggaaatgctgaaagaactgttccgcatcgaagtgccggaaatcggcgaagaagtgattgaaattaaagcggcagcccgcgatcctggctcccgtgcgaaaattgcagtgaaaaccaacgacaagcgcatcgacccggtcggcgcctgcgtaggtatgcgcggtgcgcgcgttcaggccgtgtcgagcgagctcggcggcgaacgcatcgacatcatcctgtgggatgataatccagcgcaattcgtcatcaacgccatggcgccggccgacgtcgcgtcgatcgtggtagatgaagataactgcaccatggatatcgccgttgaagccagcaacctggcacaggcgatcggccgtaacggccaaaacgtgcgtttggcttcccagctgctgaaacaacaccgcggcgacgatcgttgggaactgaacgtgatgacggcggacgacctgcaggccaagcaccaggccgaggctcatgccgctattgataccttcaccaagtatcttgatatcgacgaagatttcgccaccgtactggttgaagaaggcttctccacgctggaagagctggcctacgtgccgatcaaagagctgttggaaatcgacggtctggatgaagatacggttgaagcattgcgcgaacgcgccaaagctgcattgaccacgctggccctggcacaagaagaaagcctgggcgacaacaaaccggccgacgatttgctcaacctgccgggtcttgagcgcagcatggcctttaaactggccgcgcgtggggtttgtacgctggaagatcttgccgagcagggtgttgacgatctggctgatattgaagggcttagcgacgagcaagccggcgagctgatcatggctgcgcgcaatatctgttggtttggcgacaacgcgtaataactgtagcaggaaggaacagcatgacgacagatgtaaccgtaaaatcgctggcagcagagattcagactccggttgatcgcctggtacagcagtttgctgatgcagggatcaacaagtccgagtcggactctgttacccagcaagaaaaagaaacattgctggcgcacctgaaccgtgaacacggcagcgcgccgggtaaactcactttgcagcgcaaaacgcgcagcaccttgaatatcccgagcaccggcggtaaaagtaaatcggtgcaaattgaggtccgcaagaaacgcacttatgtaaatcgcgatacgcaggaagcccagttggctgaagcggcagagcaggcacagcgtgaagcggaagagcaggcacggcgcgaagcggaagagctcgcaaaacgcgaagcggaagcgaagcgcgcagccgaagagcaagccaaacgtgaggccgcggagattgctaagcgtaattcagcggaaaaagaaaaagtgaccaatcaacataccgacgaaatgaccaagccagctcaggcggaaaaagcacgccgtgaagccgaagccgctgaactgaaacgtaaagcggaagaggaagtgcgccgcaaggttgaagaggaagccaagcgcgtggcggaagaagcccgtcgcatggccgaagagaacggcgagaagtgggcccaggcagacgcggcaagcgccgcggttgaaagcgccgactatcacgtgaccacctctcagcacgcccgtgccgctgaagatgaaaacgacgccaaagttgaaggcgatcgtcgcagccgcacccgcggcggcaaagccaccaagcagaagaaaggcaacaagctgtccgaatccaaagcggatcgcgaagaagcgcgcgccgttacccgtggtggtaaaggcaaacgcaagcctagcgctctgcagcagggcttcaacaagccggcgcaggtggttaaccgcgacgtggtgatcggtgaaaccatcaccgtggccgagctggccaacaagatggcggtaaaaggttctcaggtcatcaaagtgatgatgaagctgggcgccatggccaccatcaaccaggttatcgaccaggaaaccgcgcagctggttgccgaagagatgggccacaaagttatcctgcgtcgtgaaaacgagctggaagaagcgctgatgagcgaccgtgatacgggcgctgcggccgagccgcgcgcgccggtcgtgaccatcatgggccacgttgaccacggtaaaacctctctgctggactacatccgctccaccaaagtggcggcgggcgaagccggcggcattacccaacacatcggtgcctaccacgtagaaaccgagaacggcatgatcaccttcctggacaccccgggccacgccgcgtttacctcgatgcgtgctcgcggtgctcaggcgactgacatcgtggttctggtggtggcggccgacgacggcgtgatgccacaaaccatcgaagctatccagcacgcgaaagcggcgcaggtgccgttggtggttgcggtgaacaaaatcgacaagccggaagccgatccggaccgcgttaagcaggaactgtcccagtacggcgtgatgccggaagagtggggcggcgaagcgcagttcgtccacgtgtccgcgaaagccggtaccggtatcgacgagctgctgcaggctatcctgctgcaggccgaagttctggagctgaaagcggttcgcagtggcatggcgagcggcgtagtgatcgagtccttcctggataaaggccgtggcccggtggctaccgtgctggttcaggaaggtacgctgaacaagggcgacatcgtcctgtgtggcttcgaatacggccgtgtgcgtgcgatgcgcgacgaattgggccgtgaagtgacctccgccggtccgtccatccctgtggaaatcctgggtctgtccagcgtgcctgcagcgggtgacgaagcgaccgtggtgcgtgacgagaagaaagcgcgtgaagtggcgctgtaccgtcagggcaagttccgcgaagtcaaactggcgcgtcagcagaagtccaagctggaaaacatgttcgccaacatgaccgacggcgaagtgtccgagctgaacatcgtactgaaatccgacgtacagggttcttgcgaagcgatcagcgactcgctgctgaaactctccaccgacgaagtgaaggtgaagattgtcggctccggcgtaggtggtatcaccgaaaccgacgcgacgctggcggcggcttccaacgccatcatcctgggcttcaacgtgcgtgccgacgcttctgcgcgccgcgtgatcgaagcggaaagcctggatctgcgttactactccgtgatctataacctgatcgacgaagtgaagcaggcgatgagcggcatgctggcgccggaatacaagcagcagatcatcggcctggccgaagtgcgcgacgtgttcaaatcgcctaagttcggcgctatcgccggctgtatggtgaccgaagggaccatcaagcgtcacaacccaatccgcgtactgcgcgacaacgtggttatctatgaaggcgagctggaatccctgcgtcgcttcaaagatgacgttaacgaagtccgtaacggcatggaatgtggtatcggcgttaagaactataacgacgtgcgcgtcggcgacatgatcgaagtgttcgaaatcattgagatccaacgcaccatcgcttaacgattgcacatctgcttatatctgtttacggggggcctttgtgccccccgatttgtctggagaatccaaaatggcaaaagaattcagccgcggtcaacgcgtggcgcaagagatgcagaaagagattgcgatcattctgcagcgtgaagtgaaagatccgcgcgtcggcatggcgaccgtttccggcgtggaagtgtcccgcgacctggcgtacgccaaggtttacgtcaccttcctgaacgtgctgaccgagaaccacgatccggatctggtcaccaacggcatcaaagcgttgcaggacgcttccggttacatccgcactctgctgggcaaagcgatgcgcctgcgcgtggtgccggagctgaccttcgcctacgacaactccctggtggaaggcatgcgcatgtccaacctggtgaccaacgtggtgaagaacgacgccgagcgccgttccgcctcaggcgatgacaaggaggactgatgagtcgccctcgtcgccgcggccgtgatatccacggcgtgctgttgctggacaagccgcagggtttgtcgtccaacgatgcgctgcaaaaagtaaagcgcctgtacaacgccaaccgagcgggtcacaccggcgcgcttgatccgttggcgaccggcatgctgcctatctgcctgggcgaagcgaccaagttttcgcaatatctgctcgattccgacaagcgttatcgggtgatcgccaagctggggcagcgtaccgatacctcggacgccgacggtcagatcgtgcaggagcgcccggtgaactttacccaggcgcagctcgacgcggcgctggacaccttccgcggtgacatccagcaggtgccgtcgatgtattcggcgctgaaataccagggcaagaaactctacgagtatgcgcgccaggggattgaagtgccgcgcgaagcgcgcagcatcacggtgtacgagctgcagtttatccgctgggaaggggatgagctggagctggagatccactgctcgaaaggcacctacatccgcaccatcaccgacgatctcggcgagctgctgggctgcggcgcgcacgtgatctatctgcgtcgcctgcaggtggcgacttacccgatcgcgcgcatggtgacgctggaacagctgaacgccttggtggcgcaggcgcaggaacaagcgatcgcccccggcgagctgctcgatccgctgctgatgccgatggacagcccggttgagaactatccggaagtgaatttgctgccggtggtggcgggctacgtcaagcaggggcagccggtgcaggtggccggcgcgccggcttccggcatggtgcgtatcaccgagggtgaagagcggaaattcatcggcgttggcgacatcgccgaggatggtcgcgtggcgccgcgccgcctggtggtcgaacatttcgactgacggcggggcactgcgtcgccttgcgatcgcactgcgctaagagtagaatggcgcagcttatgcattgggttgctgaattagagatcggcgcctgtttttattatctataatctggagtattacaatgtctctaagtgttgaagctaaagctcaaatcgtagctgatttcggtcgtggtactaacgacagcggttctaccgaagttcaggttgccctgctgactgcgcagatcaaccatctgcaaggccacttctccgagcacaaaaaagatcaccacagccgtcgtggtctgctgcgtatggtttctcagcgtcgtaagctgctggactacctgaagcgtaaagatgtagcacgttacaccagcctgatcgagcgtctgggtctgcgtcgctaatctagcaagtttcagtggaaaggggcctattttggcccctttcttctaggaagcataagcaaatcaggttaatgtattactgatgtttccaaacaggttcttccgttacagaggttcgcgcggctaatgagaggctttatctcccgcctgagataaggattgtcattagtcgcgaggatgtagtgagaaggcaaatcgagtcacaggcgtgtcgagtcgtcaatgcgattgcgcgccgctaatcaaggatataattttgctgacaccgatcattcgcaaattccagtatggccagcataccgtcaccatcgaaaccggtatgatggctcgtcaggccaccgccgccgttatggtgagcatggatgacaccgctgtattcgttaccgtcgttggccagaaaaaagccaagccgggccagagcttcttcccgctgaccgttaactaccaagagcgtacctacgccgccggccgtatcccgggcagcttcttccgtcgcgaaggccgtccaagcgaaggcgagaccctgacttcccgtctgatcgaccgtccgatccgtccactgttcccggacagcttcctgaacgaagttcaggtgatcgcgaccgtggtttccgttaacccgcaggtgaacccggacatcgttgcgatgatcggtgcttccgcggccctgagcctgtccggtattccgttcaacggcccaatcggcgccgcgcgcgtgggttacatcaacgaccagtacgtgctgaacccgacgaccgacgagctgaaagaaagccgtctggatctggtggttgccggtactgccggtgcggtgctgatggttgaatccgaagcggacgtgctgagcgaagatcagatgctgggcgccgtggtgttcggccacgaccagcagcaagtggttatcgaaaatatcaacgcgctggttgccgaagccggcaaaccgaagtgggattggcaggcgcctgcggtcaacgaagcgctgcacgcgcgcgtggctgaactggccgaagctcgcctgggcgacgcttaccacatcaccgaaaaacaagagcgttacgctcaggttgacgcgatcaaagacagcgtggttgaaaccctgctggcgcaggacgaaacgctggacgccggtgagatccaggacatcctgggcaacctggagaaaaacgtggtgcgcagccgcgtactgcgtggcgagccgcgtatcgacggccgtgaaaaagacatgatccgtggcctggacgtgcgcaccggcgtactgccgcgcacccacggttccgcgctgttcacccgtggcgaaactcaggcgctggttaccgcgaccctgggcaccgcgcgcgacgcccagaaccttgacgagctgatgggcgagaagaccgacagcttcctgttccactacaacttccctccgtactccgtaggcgaaaccggcatggtcggttctcctaagcgtcgtgaaatcggtcacggtcgcctggcgaaacgcggcgtattggctatgatgcctaaaccggaagatttcccgtacacggttcgcgtggtgtctgaaatcaccgaatccaacggttcttcttccatggcttccgtgtgcggcgcgtctctggcgctgatggacgccggtgtgccaatcaaggctgccgttgcgggtatcgcgatgggcctggtgaaagaagccgacaactacgtggttctgtccgacattctgggtgacgaagatcacctgggcgacatggacttcaaagtggccggtagccgcgacggtatcaccgcgctgcagatggacatcaaaatcgaaggcatcacccgcgaaatcatgcaggtggctctgaaccaggccaagggcgcgcgtctgcacatcctgggcgtaatggaacaggctatcagcactccgcgcggcgatatctccgaattcgcaccgcgtattcatactatccgcatcaacccggataaaatcaaagacgtgatcggtaagggcggttccgttatccgcgcgctgaccgaagagactggcactaccatcgaaatcgaagatgatggtacagttaaaatcgctgcgaccgacggtgagaaagcgaaattcgctatccgtcgcatcgaagagatcacggcagagatcgaagtgggccgtatctaccagggtaaagtgacccgtatcgttgatttcggcgcattcgtcgctatcggcggtggtaaagaaggtctggtgcacatttctcagatcgccgacaagcgcgttgagaaagtgaccgactatctgcagatgggtcaggaagtgccggttaaggtactggaagttgaccgtcagggccgcgtgcgtctgagcatcaaagaagcgatggcgccggaagcaggttcacctgcgcctgaagcagaataactgtatagatagttttacagctccccgccacggggttgggggctgttcgtatcgcgcgggtaggatgcccgcgttttagcaaacggaggacaggacgttcatccaatgtttgtcttcgggagtgggaaatgaagcctttcttgcgctggtgttacgttgcgacagcactcatgctggcaggatgcagcaaccatgattggcgtaaagacgaagttttggcaatcccgttgcagccaacgttgcagcaggaagtgatcctggcgcgcatggaacaaattcttgccagccgggcactgacggatgacgaacgcgcacagcttttatatgagcgcggtgtgctgtatgatagcctcgggttacgtgcattagcgcgcaatgatttctcgcaggcgctggcgatacgtcccgacatgccggaagttttcaactacctgggcatttacttaacgcaggcaggcaattttgatgctgcctatgaagcgtttgattctgtactagagcttgatccaacttacaattacgcgcgtttaaaccggggcatcgcactgtattatggcggccgcttcccgttggcgcaggatgatctgcaggcgttttatcaagacgacccaaacgatcccttccgttcgttatggctgtatctggtggagcgagaaatcgatcccaagaaggccgaggtagcgcttcagcagcgctatgacaaagcggacagagggcaatggggatggaatattgtcgaattctacctgggcaagatcagcgaaaaaacgctgatggaacgcctcaaggcagatgcaacggataacacttcgctcgctgagcatctcagtgaaactgacttctatttgggtaaacactacctgagtctgggggacaaggacaccgcttcggcgctgttcaaactgacggtgtctaacaacgttcacaacttcgttgagcaccgctatgcattgttggaattggcgcttttgggccaagagcaagacgacctatcggaatcggaccagcaatagctgacgaacacctatcagcctgatggacattggtttttaaccaaagttatcgccttcacgggcgagggcttttttgttcgttttataatctaatttgagccggttcacacttttcaatgaaaatgactgaaaattttctcgacgagttatgtagactggctgccattattaatgaggcacgtgtacatgacgactgagtttgaaacctcttttgccgatctggggctgtctgctccaatcatttccgccctgaacgatctgggctatgaaaaaccatctccgatccaggctgagtgtattcctcacctgttgaacggccgcgacgtgctgggcatggcgcagaccggtagtggtaaaactgcagcgttctcgctgccgctgctgcacaacctgcaggcagacctgaaagcacctcagatcctggtgctggcgccgacccgcgaactggcggttcaggttgctgaagcgatgaccgatttctccaaacacatgaacggcgtcaacgtggtagccctgtacggcggccagcgttacgacgtgcagctgcgcgctctgcgccagggcccgcaaatcgttgtgggtaccccaggccgcctgctggatcacctgaagcgcggcaccctgaacctctccaacctgagcggcctggtgctggatgaagccgacgaaatgctgcgcatgggctttatcgaagacgtagaaaccatcatggctgagatcccggctgaacatcagaccgcgctgttctccgccaccatgccggaagcgatccgtcgcatcacccgccgcttcatgaaagagccgcaggaagtgcgcatccaatccagcgtcaccacccgtccggacatcagccagagctactggtcggtctacggcatgcgtaaaaacgaagcgctggtgcgtttcctggaagccgaagactttgacgcggcgatcatcttcgtccgtaccaagaacgcgaccctggaagtggccgaagcgctggagcgcagcggttacagcagcgccgcgctgaacggcgacatgaaccaggcgctgcgtgagcagactctggagcgtctgaaagacggtcgtctggatatcctgatcgcgaccgacgttgcggcccgtggcctggacgttgagcgcatcagcctggttgtcaactacgacatcccgatggactccgagtcttacgttcaccgtatcggccgtaccggtcgtgcgggccgcgctggccgcgcgctgctgttcgtggaaaaccgcgaacgccgcctgctgcgcaacatcgaacgcaccatgaagctgaccatcccggaagtggaactgccgaacgcagaactgctgggcgagcgtcgtctggccaagttcgccgcgaaagttcagcagcagctggaaagcagcgatctggacctgtatcgcgcactgctgaccaaactgcaaccggaagaagagctggatatggaaactctggccgcagcgctgctgaaaatggcacagggcgaacgtccgctgatcctgccgccggatccggtcttcaagccgcgtcagcgccgcgagttcaacgaccgtgacgatcgtcgcggtgatcgtggcgaccgtcgtgacagccgtgacggcgatcgtccgcgtcgcgaacgtcgtgacgttggcgaaatgcagttgtaccgcatcgaagtgggccgtgacgatggcgttgaagtgcgtcacatcgttggcgctatcgctaacgaaggcgacatcagcagccgttacatcggtaacatcaagctgttcgcttcccactccaccatcgagctgccaaaaggcatgccgggcgagatcctgaatcacttcactcgcactcgcatcctgaacaagccgatgaacatgcagctgctgggcgatgcacagccgttcgaacgtcgcgagcgtcgtgacggtggcaacggcggcgagcgtcgcggcaacggtcgtccgttcaacggcgaacgtcgcgaaggcggcccacgtcgctccttcggcgaacgtcgtgaaggcggcaacggcggcgagcgtcgtggcggtaactacaaccgtgacggcaagccggcgccacgccgtgatgacggcgcaccggcggcaccacgtcgtcgtttcggcgacgcgtaatcgctgattcgccgttcgcggtgaagcgctctgaaaaaccagcctgcgggctggtttttttatgcctgaaaattgccgtcaaacgcccctgaatggcgtatcattcataaggttttttcttacggatgatatgcacgggagatgccatgagttggcagcagttcaaatctcaatacctggtgcgcttttgggcgccgctgccggcggtgatcgccgccgggatcctctctacctactacttcggcatgaccggcaccttctgggcggtgaccggcgaattcacccgctggggcggccatgtgctgcagtggttcggcctgcaccccgagcaatggggctatttcaaggtcatcggcctgcagggcacgccgctggagcgcatcgacgggcgcatgatcatcggcatgttcgccggctgcatcgccgccgcgttgtgggccaacaacatcaagctgcgtcaaccgcagcaccgcattcgcatcgtgcaggcgctgctgggcggcatcatcgccggcttcggcgcgcggctggcgatggggtgcaacctggcggcgttcttcaccggcattccgcagttctcgttgcacgcctggttcttcgcgctggcgaccgcagccggctcttacttcggcgccaaattcacgctgctgccgatgttccgcattccggtcaaattgcaaaaggtgaaggccgccgcgccgctgacgcagaagcctgagcaggcgcgccgtcgcttccggttgggcatagcgatcttcggtctggcggtggcctggtcgctgtggacgctgttcgatgcgccgaagctcggcatcgccatgctgttcggcatcggctttggcctgctgatcgagcgcgcgcagatctgcttcacttcggcgttccgcgatctgtggatcaccggtcgcacccacatggcgaaagccatcatcatcggcatggcggtgagcgccatcggcatcttcagctatgtgcagctcggcgtggcgccgaagatcatgtgggccggcccgaatgcggtgctgggcggtttgctgttcggcttcggcatcgtgctggccggcggctgcgagaccggttggatgtaccgcgctgtggaagggcaggtacattactggtgggtagggctgggcaacatcatcggcgctacgctgctggcctattactgggacgacctggcgccggcgctggcgaccgactacgacaagatcaacctgctcgataccttcggcccgatcggcggcctgctggtgacttacctgctgctggcgctggccttcgccgccatgctgtggtgggagaaacgctttttccgcgcccggcctgaggcgcaggtggtgaatttgaggagcatgccatgaaagagacgacgatagtgccggactaccggctggacatgctgggggagccttgcccgtacccggcggtggcgacgctggaggcgatgccgcagctgaagccgggggagatcctggaggtgatcagtgattgcccgcagtcgatcaacaacatcccgctcgatgcgcgcaaccacggctacaaggtgctggatatccagcaggacgggccgaccatccgctatctgatccagcgttaacgccgaggcggtggggttcccaccgccttttcgctttttagcccttcacgatgtcgcctttcacgccggcgacgatctcgaacgaacgcagccgcgcctgatgatcgaagatctggccgttgaccatgatctcgtcggcatcggtttcacgcagcagcgtttgcagcccgtgacgcaccgttttttcatcgccgacgatcgacatccgcagcgcctgttcgacgccgtactgctcgccggcgctccacagcgcgtggatgttatccaccggcggcggcagcgggccgggcgaaccgcggcgcagattgatgaactgctgctgcatcgagctgaacaggaagcgcgcgtcgcggtcgctgtcggcggcgatcacgttgacgcacaccatggcatgcggctgcgccagctgtttggagggtttgaagttctcgcggtacagttgcagcgcctggaacagcatatccggagcgaagtgcgaagcgaaggcgaacggcaggccgagctgcgccgccagctgtgcgctgtagaggctggagccgagcagccagagcggcacatgcagcccctggcccggcaccgcctgcaccggctggccgggctgcgcgtcgcagaagtagttttgcagttcctgcacgtcgcgcgggaaggtatccacatcgccggacaggtggcggcgcagcgccatcatggtgcgttgatcggtgccgggcgcgcggcccagccccagatcgatgcggccggggtagagcgattccagcgtgccgaactgctcagcgatcaccagcggcgcatggttcggcagcattacgccgccggagccgaggcgaatgctctgggtgccggcggccagatagcccagcagcaccgaggtggcggcgctgccgatgccggtcatattgtggtgctcggccagccagtagcgctggtagccccagcgttcggcgtgttgcgccagatccagcgaacagtggaaagcgtcgcgcgccttggccccttgcgggattggcgataaatccagtaccgaaagcggtacggcagtgtgttcagtcatgacatcgtccatcagagagtggatcgcttaaagggcgattgcaggaatctgcatactaaaaggccgaaaaaagatgctttttagtgttaaaagcataatccaatttatagttataaaagaggagatatgtgcttgtgatatcctcatgagtgcaatggtgttttttggagcaatttgagacatggaaatgatgatccccgcccgccgcttaccgttccgggagccgatataatgaaaaaaaagacgctgtttaccctgttgctgatgatggtggcgatcgcattggcgatcctgttccgcgcgcacaatcaggatctgttgctgcagggtgaagtggatgcccccgaagtgatcgtcgcatccaaggcgaaaggccgggttgttgaacgcctgatcgaacgcggcgatgacgtgaaaagcggccagctgatcatccaactcgacagccccgaattgatggcgcagctgcgttccgcgcaggcgacgcgcgacgaggccaaagcgcagctcgagctgtcgctgcacggcacccgagaagagagcatccgcaacctgcgcgccaacctggcgcaggccgaggcgcagtaccgcaatgcgcaaaacgactacaaccgtaacctgagcgtggccggcaagggctatatctcgaagtccgagctggacgcttcgcgccggtcgcgcgacaccgccttccagcaggtgcaggccgccaaggccaacctggatgaaggcatcaacggcgaccgcgtcgagcagcggcagcaatatgcggcggcgctgcgggcggcggaagagaacctgctgcagatccaggcgcagagcgacgatctgcaggtgaaagcgccggtggacggcgaagtggggccgatcccggccgaagtgggcgaattgctgaacgccggcagcccgctggtgacgttgatccgggtgccggacgcttacttcgtgtttaacctgcgtgaagacatcctggcccacgtgcgcaaaggcgacaaggtcaagctgcgggtgccggcgctgaaggacaaaatgatcgacaccgaggtgcgttacatcgcgccgctgggggattacgccaccaaacgcgccacccgcgccaccggcgacttcgacctgaaaaccttcgaagtgcgcctgtatccgtcacagccggtggacggcctgcgtccggggatgagcaccttatggcaatggaaagagtaagggccggctggcgctgcttcagtcacgcgttcgacaaagagtgtcgcgtcgcctttcgcagcccggtggtgcactggctgagctggatctttccgctgatcctgtttgcgctgatcagcagcaacttctccgaaggcacgctgctcgatctgccggtctcggtggtggacagcgatcacagcccgctgtccaaatcgctgacgcgccggctggacgccgggtcgcacgcccacgtcgaggcatacggcggcgggctgccggagtcgctgagccgcctgcgcagcgcgcaggattacgcgttgctgtatatcccaccggactttgaggccaatgcgctgtcgggcaaacagccgagcgtggtgatgtactacaacgcgctgttttacggcgccgggctgtactccacccaggacttcggcggcctgatgaacgaaatcaacgccagcacccgcagcatcatcgccaccgagatgggcaaaacgttgccgccgctggcggacgtgacgctctcctacggcagcctgttcaacgccagcggcagctatatctattaccagcagttcgccgccaccatccacctgctgcagctgttcgcggtgacctgcatgatatatgtgctggcgcgcagcaagtcgctgctgcaggccaagccgttcagcctggcgctgctcggcaagctggcgccgtacacgctgtgtttcaccaccctgctgatggtggagatcgcggcgctggtgggcatctttgacgcccgcgtcagcggcaacccgctgtttatgctgatgatcggcctgttttatgtgatggcggcgcagagcatcggcctgctgctgtacacctttaccggcagcaccatcaccgcctacagcctgatcggtattttggtcagtatcgcgatgaccttctccggcatggcggtgcctgagctgtcgatgccgctgccggcgcgcattatttccaacatcgaaccgctgacccacgcgctgtacgcgatgtttgacgtgttcctgcggcaggtgcacgccagcgccatcttcagcgtgtgcgcgctgctggcggtctatccgctggtggccgcgctgctggtgcgcaatcgcctgccggcgcggctggcaaaagaggggagcgccggatgaagctttattggcaaaccttcgttaaagtgctgctcggcatgctggagcggccggtgtggctgatgctgatcctgtcgctgtgcatcatgagcctggtgtacgccaaccgcacggtgtgggatctgccggtgggtgtgatcgatcaggatcacagcaccgccagccggcagctgatccgccaactggacgcaacctccaagatcgcgattgaaacctacgacagcctggaacaggcgcagcgcgatctcagctggcgcaagctgtttgcggtgatcatcatgccggtggatctggagaagaaaattctcagcgggcagaacatcgtggtgccgatgtacggcgacgccaccaaccgcctggccaacggccagatccagcaggacgtggtggcggcctatcagcagctgctgacgcaatacaacaacgggctgctgctgcgcagcggcttcagcgaacggcaggcgcagatactgctgacgccgatactggggcaaacgctggacgtgttcaaccccggcatcagctttgcggcgatcatcttccccggcctgctggtgatgctgttacagcactcgctgctgatcgcctgtatccgcgtcaatatcgccatgaagagcatgcccggcggcaaggcgccgctggcggcgcacctcggcgggctgacggcgctgctgccgatctggctgttcctgtcgatcgtgctgttcgtgctgtggccgtgggtattgggctataggcagacggcgaacatcgccgaactgctgctgctgaccttcccgttcctgctggcggtattggggctgggcaagctggtgacagaatgtctgcgcagcgtcgagatgatctacctgacgctggcgttcatcaccacgccgatcttctacctgtccggcactatctggccgctgcagtcgatgccggcctgggtgcgcgccatctcgtacagcatcccctccacctggggcaccaaggcgatcgccggcgtcaaccagatggggctgtcgctgaatgaggtgtggggcgacgtggtgatgatgctgatactcggcgtggtctacaccctactgggctttggcgtcggcttcttgcgcaacagcgtggcgctgcgcgggatgttcaggaagcggcgggcgtaggggataaataaaggcgccattttcggcgcctttattatttcgtattattgatatgtctaaggtgatttatttagctgggcgtctactcttatttttaatttgatttgttatgttgattttggtagttgtaattgtcgacctgcttagggaattaatggttggcgttaactttatctataacgtgttatttaaaggatggaataatatgtcaacaataagagcgcttgattttgatgagataaaattgattggcggttgtggcgatggaaataacggcggcgatcgtgacaggccaggcagaggtgcgtcaaactcttgtgccaatcaggttggaatgggcattatcattggcgcatttaccggtttttccggcggccctccagggatgataggtatggcggttgccggtggcttaatgggggcggtctcttgcgcagataacagccctgccgggaataataagaataacggtggtgccttgggtgggaataaaaacgccaatagcgttaatgggcaatgtcgctggtgatgagtaaatcgcttttagagtgttaaaaatagagggtgggttatggttaatagacgtcttttaaacccgctatgtaatatgattgcgctaacgttgagtatgttacttgtctcgttctcctcactgagtattatttcatacggagaacatttggtagatgcggccatcgcggttttcacttattttggtatcagaagctgctgcctgatgtgtgtaagtttattccattggttccacggtggagatgagcgcattaatcttgataaataaacagagccggcagcgcccgctgccggctctgtcctcgttaagacaccaactccagccccgccacccggcgccagtagccgttgcagtcggcgtggtcggtcaaggccagcggctgctcaccgcgctcgttggcgcggaaggcgtcgatttgcgccagcgtctcggcgccctgcggcgacagccgcacgatgtccaccagcccctgcatgcttggcagctcgttgccgaggttgtagcagtaaccgctcatggtctggatgccgttgagcacgaacacctgctgttgctcctgggagcgcatcatgcggccctgcggatatttgatgcagcaggtttcgcactcgtccttgccgcggttctccgagcgggcggtgaagcagcgcgccgagtaggccaacggcaggtggccgtagctcagcacctccacctcgaaatcgtggcggaagcccagctcgtcgcactgcgtcagcaggttggccagccagtcgcgcgacagctcgaccggcatgcaccagcgcaccatgccctggcggcgcagcaggcgcagggtataggcgttgtagcagttcagcgcatggccggcgacgaacggcaagccgcgttccgccgccatgttcaccgcgcccagatcgttggcttccagcaggaactcgccgttctccacatagcgtttcagctcattcagctcggacggcgcctgcagcagcgccagcgtggagataaccacctgtttgccgctgcgggcgatctcgcgcgccagcgccagccaatcgctgaccttcatctcgcgccgtttggtgcagacgctctcgccaaggtaaatgatgtcggcgctgctctccgccgcctgttgatagaacgccgcgatgtcggttttcggccagtagtagagtaccggccccagtgcgtatttcatgtttcctccggctactgccatttgcggtgataggcgcccagcgtggtctgggtgccttcggacatcgcgcccagcgtctccatccaggcggcgtcggcgcgataggcggccggatcggcctggcaacggtcgatcgcctggcgccagacgcgcgctacctggctgacgtaagccgggctgcgctggcggccttcgatcttcaccgaggcgatgttggcggccagcagctccggcagcagctccagcgtattgaggctggtgggctcttccagcgcgtggtagcgcacgtcgtccaccagatagcggcccttgcacagcgtcgggtaaccggcgttttcatggtcctgatagcggtcgatcagcacgtcgttcaggcgcgactccataccctgcggggtttgctgccagcgcacgaagcgcgccggcgagcaggcgccgacggtgttcggcgactcgccggtcaggtaggaggagaggtagcagcgcccctcggccatgatgcacaggctgccgaaggcgaacacttccagcggcaccgggctggtgcgcgccagctgtttcacctgatgcatcgacagcacgcgcggcagcaccacccggcccacctcgaagttgcgctggtagaaacggatcgcctcttcgttggtggcggaggcctgcaccgaaacgtggcgctccagctgcgggtagcgctgggcggcgtattccagcatcgccagatccgccagaatcagcgcatcggcgcccagctgggcggccatatccaccgcgcgctgccagcgggcgtagccgtcgggatgggcgaaggtgttgatggcgatatgcaatttgcggccgtggcgatgcacgtaatcaaccgcttcctgcagctttttctcggtgaagttgaggccggcgaagtggcgcgcgttggtatcgtctttcagcccgatgtaaacggcgtcggcgccgttatctaccgcggccttcagggccggcaggttgccggcggggcaaagcagctccatagatttatcctggcttagccgtgcgcccggccgggcgcacgctgtctttaaaggttgccggcggcggtgttctgccggcaaacgcgaatcggggaggccattttaggcgaaggggtgcgcacaggttttgatttggggcagcttatggcgtattgataaacatggcggtgaaatgcactatttgttgatatagaccgctgaagccgcgcgccagtgtggcaaaatagcggtagtccgtattgaaaggagtggatgaccgtgttggaacaactacgagcacgccttgtgcgccaggggccgtcgctgctgcgcatcccgctgaaattcacgccgttcgccctgcagcgccagctgctgcaacaggtgctgagctggcagttccgccaggcgttggtggatggcgaactggaatttctcgaatcgcgctggttaaagatcgaagttcgcgatctggcgctacactggtttatgacggtagaaaacgacaaactggtggtcagccagcacgccgaagcggacgtcagcttcagcggcgacgccaacgatctgatcctgatcgcggcgcgcaagcaagatccggatacgctgttctttcagcgtcggctgcagattgaaggggataccgaattgggcctgtatgtgaaaaatttgatggacgccatcgagctggaaagcatgcctgcgccgctgcgcatggggctgttgcagttggctgattttgtcgaagcagggctgcaggagggcacggcgtcggcttcccgtgtggcggcatcatgctgatccgcgtagagatcccggtagacgcggcgggcatcgacgccttgctgcgccgcgcctttggccgcgacgacgaagccgatctggtgcagcagctgcgcgaagacggcctgctgacgctgggcgtggtcgccactgacgacgaaggcggggtggtggggtacgccgcgttcagcccggtggatgtggccggcgaagatcgccaatgggtggcgctggcgccgctggcggtagacgaaagcctgcgccgtcaggggctggctgaaaagctggtgtacgaaggcttggattcgctgaacgaattcagctacgccgcggtggtggtgctgggcgatccggcctactacggccgcttcggctttaaaccggccgccgcctatggcttgaactgccgctggccgggcacggaaagcgcgttccaggtgtatccgctggcggaagacgccctgaatggcgtcagcggcgaagtggctttttcggcgccgtttaatcgcttttaaccaccggcaacaaatactccaacgacagcggcgggtgattcaccagccgctctttttgtattttgctcagttgtttgacgcggtattccagcttcaacgccgttgagcgatcccccacctggcagtgaaacgccagcgtcagctcccctttgccgcgcagcgccttggcgcctttgccggcctgatgttgcgccagacggcgcgccacgtcggtggtgatgccggtatacagtatgccgctcggtaaacgcagcatatagagataccagtggggtaagtccatcattggggtcctgtgcaagggtagagatgacatcaggccgccatagctaagcgcggcatctctattttgtcacgatttaacgatggatttcaccactggcggaacggtttgtttattccgtcttgacgataagggattattttacacccacggtaaatttgttttcttcccctttatgatgctgaattgtccactcgccactgacgcggaatgaagccgcggaagcataggtgtcttccataaactggaaataaacgatttttccgtctttgacttgcgcttttattgcgaaaggagaggtgaactgatggcctaacgctactgaggtataggtgaattgaccaaatacggccacggtgcctccgtcggcaagaatgtcaccgatcgtgaagtcgtttatttcccagtaagttccgacatttgaaaaggtatcgatgtaaacctgtcgcccttgagaagtgcccgcccagggctcgatctgtttgagctctttgttttcaaagttcagggaagtataaaccgcgttttcatcgataagacgcatggcggcattggtgacgtcttcctttgccgtgttcatcaagaatgcataaaccacatcttttggcagttgagtctcttctgctttcacaatgagtttttcattgtttttcatataaacctcgtcacgtgacttccggggtgaataattggccgtttattccgatgatgagccggtgattggttgtaaatcaacgatgatcatagcaccgccggaaagcagagcagatgatagaaagtgcttaggcgttcaggaaataaagtccctgcaaaacggcattaatcatcataacgacatattaaataaggggttttattcatggtaaaggcgttggcgcacatggggtgacgaagcgagaacgctgttttaaatggatttatataagcggtatcaatgatgttttgatgctttttatttatgaatggcggtagtgaacaggaattatgcttggtggcttggatttactgataataaagcccgagagtaagaaagagagtgagtcattccagtcactagagcggcgtgggcgacagagagcgtcggctggccagggttgcgatgaggtgatattgcgccctatcacaatcccatccccggccgccggtgccttaccgctttaccccttttttcccgccagctcgaagcgcggcgagacgatgccgtacagcgtccagccgaggaaggtggcgatggcgccccacatcatcgcttcctcaccggagctgtagagcgcgtagaagctgtacagcgcgccgatgccggcgatgatattggcgatgcgcgccttgttgtccggcaccttcgccactttctgaataatcaccagcgccgccatcgacaggatgtaagggatgatgttggtcaccaccgccaggttcaccagcacgttgaactgtttgttcaacgacgggctgatggtcatcagcgacaaaccgctctggatgacgacgatggtcagcatgcctttaaccggcgcgtcggccttgctcagcctggagaagattttcgggaagaagccgctgtcggcggaggatttgaacacctgagcgatggtgaactgccagccgagcagcgagccgacgcaggacatcaccatcaacgccatgatgatcttgccgaccgtcgggttgaacatgtgggagaaggccagcccgaacggggcggtggagttggccagatccatgttcggcacgatgccggcgatcacgttggtcgaaacgatatagatcaccgccgcgctgagggtgccgcccagtacggcgatcggcacgttgcgctccgggttttccaccacgtcggtgttggcgcaggcggattccagccccaggaatgcccacagggtcatcgagatcgaggcgccgatggcttcgaaggtcggcacctgatgcgggttccaggcggcgacgtaggcgctgccgctgaaccagtaccagccgatgaccgagatgcccaccaccggaatgatcacgccccagacggtgatgccgctgattttgccggtgatgcgcgcaccgccgaagttggcgacggtcgcaagccacagcacgccgatggtggcgatacagatcccgagcgggctgagcgtggtgtcgaacagttcggtgccgtagcctacggcggaaatggcgatggcgatgttggcgatcagcagcgaaacgccataggtgtagttcgccatgaagttgcctgatttaccaaaggcgtattcggcgtagccgcccatgccgccggatttacggctgaacatgccgcatttggcgaacgcgtaggccaacgccatcgagccgacggcggtcaccagccaggaaacgatcgaaatcgtgcccacttcggccaacttggtcggcagcataattatgccggaacccatcatattcacggcggtcaggatcgttaattgcacgacccccattttattattggacttactcatgatcattttctcttttaggatgcgatccgggcggcgagaataatcgccgccccgtaaggtgattaatttttcatgacgtagccgtaagcgcggttccagccgtcctcatcctgttggatataaacgccctgcaattccggcgcgaatcccggcaataaattgatgccttcttccagtgccaggaaataacgctgcgcggcgccaccccaaatttcgccgggcaccacgcacagcacgcctggtgggtaaggcagggcgccttcggcggcgatgcggccctcggccttggccagcgacaccaattccacattgccgcgcacgaactcggtattggcgtcctgcgggttcatcaccacgcgtgggaaatagcttttgcggaacatctctttttgcagttctttaacgtcatagctgacgtaaaggtcgtgcatttcctggcacagctggcggatggtgtagtttttgtagcgctgctggtggtttttatagaccgcaggcagcacctcgctgagcaatgagttttgctcgatatgcttctcgaagcgggcgatcagggccaccagatgctgcatcttggcgatgtcttccgccggcgtcagcaggaacaggatcgagttgagatcgcatttttccggcacgatgccgttttcacgcaggtagttggccagaatggtcgccgggatgccgaactcgctgtagctgccggtcgcggtatcgatgcccggcgtggtgagcagcagtttgcacggatcgacgaagtactgcgattcggcatagccctcaaaagcgtgccatttttcgccgggcacgaagttgaagaagcgcagatcgttggccatcgccgcggtgtcataggcctgccaaggcttgccgtcgatctgatccggcacgaacggtttgatcatcgtgcaggtatccagcagcattttgcgcgcttcgatgcccacgcgcacacattcttgccacaggcgctggccgctcttgccctcgtgcatcttggcgttgacgtccagcgcggcgaacagcgggtagaacgggctggtggaggcgtgcagcataaaggcgttgttgaagcgcttgtggttgcagtagcggctctgccccttgatatgcttgtcttttttgtggatctgcgaggtctgcgagaaaccggcctgctgtttgtgcaccgactgggtgacgatgatgccgggatcgttttcgttcagctccagcagcagcggcgagcagtctttcatcatcggaatgaactgctcatagcccacccaggcggagtcgaacaggatgtagtcgcacaggtggccaattttgtcgaccacctggcgggcgttgtagatggtgccgtcgtaggtgccgagctggatgatcgccaggcggaacgggcgggcttcgttggcgcgttccggcgccacttcgcggatctgttggcgcaggtagcgttcgtcgaagcagtgcgcgtcgatgccgccgataaagccgaacgggttgcgggcggtttccaggtaaaccggcgtggcgccggcctggatcaacgcgccgtggtggttggatttatggttgttgcggtcgaacagcaccagatcgccgcgcgtcagcagggcattggtcgccaccttgttcgaggccgaggtgccgttgagcacgaagtaggtcttgtcggcgttgaacaccttggcggcgtgctgctgtgcagcgcaaggcgcgccttcgtggatcaacagatcgcccagtttgacgtcggcgttgcacatgtcggagcggaaaagcgtttcgccgtagaagtcgaagaactggcggcccgccggatgtttgcggaagaactcgccgccctggtggccggggcaggcgaaagtggcgttgcccatttctacgtattgcgtcagcgtgttgaagaacggcggcagcagttcgctctcatatttggcggcggcggcctccagctgtttgccgtagaactgggtattcttgccgcacagttcaaacacaccgtgcagcgccggcaagacggcgttatccagctcttcttcgcagcagacggcgacgaacagcggaatgttcaggccgtgttcttcgatgcgcgccaccatgccttgcgcgacgtcgtctaccgacagcacgatggcggcgacgtcattgaaatcgctgtgatgcacatcgacgatgtcgcgttcagtttcaaagcagccgagggtttgggtgttggcggcaatttttaattttttcatttttctcattcttcaggcaaaggcattccgccggcaaataatttcatttgccgctaacgccttcacgaaaataaaggtgtgcgagaacccagtgatgccgaaaggcattaactgtgttcgctgttttatttatattggatgcgcttggccgaaattaaaaatgtattgcgcgcccttcccgcttagcgagaaaaagacattatcaccggagtgcggagaataaagtgaaacgcaaagacactcttaacaacggcgtaagagcgaaggggagggttatctgtagttgaagaatgcgaagctaaagcagctgcgatgagccatcatcataatatgggttgtacgcctgatgtgcgccatttttcggttattgttttccattttctaatccaccttgctgagtgaaaagatggcgctattttagcgcaagatgcactaaaaattgtgatgagaatcacataaatgccggttttgataaataactattcaccggttatgcaatgtgttgcataagtatcatccagacgcagaggttggcatgtaaatgaattgctaatgttcgcgggccttgagcgcttaattttgatgccgcccgagaaggaataaaaaaagcggtcaaataaccggctgcataacgatcaaataaatccgcattgtgttatttatgttatcaatctgctttatgctggattgggtaaaaattcaaatataatggttttgtattcacatgcgatttttgatgattatcgttatttgtgactcgcctcaacaacgcagggtaagatgaagtgagtgaacagggaggcgagtaaccttgaataccccagaacaacggcagcagattgcggattttatcggtaaacaacacgtcttgacgctgtgcgccggcgacggcctcgacatgtggtgtgccaactgtttttacgtgttcgacgccgcgacgatggcgctgtggctgatgaccgaaccgcacacccgccacggcgggctgatgctgaacaacggccgggtggtcggcaccatcgcgccgaagccgaaaagcatcgcgctgatccgcggcgtgcagtaccgcgccgaggcggtgctgctgagcggcgaagaggccgaggcggcgcgcgcacgttactgcaagcgtttcccgatcgccagggcgatgaaggcctcggtttggcggctggatctgcacgaggtgaagatgaccgacaacaccctcggcttcggcaagaagctgcactgggcgcggtctatactttaagtcgacgtattgattacaacgggagatcgcatggcgcgagcactgttagtcggcgcaaccgggctggtggggcgcgagttgctgcagcggttgcaaagcgatccgcagataacggccatcgtggcgccgacgcgcacgccgctgccgccgcacggcaagctgaccaacccggtcggcgatgcgctgttcgagctgctgagtagcctgcagcaaccggtcgatctggtgttctgctgcctgggcaccacccgccgggcggcgggcagcgccgatgccttccgctacgtcgattatcaactggtggtggagagcgcgctgaccggccgccgcttgggggcgcagcactgtctggtggtgagcgcgctgggcgccaacgcggattccaccttcctgtataaccgcaccaaaggcgagatggagcaggcgctgcgcgaacagcgctggccgcgcctgacgctggtgcggccttccatgctggtgggggatcgcccggcgccgcgcctgatggagcgcctcacgttgccgctgttcaggctgctgcccggcaaatggcgggcggtcgccgccaaagacgtggcgcagacgctgttgcagcaggcgttcacgccgggtgaaggggtcagggtgctggagtcggaccggctgcactgctaccgaggctgacgctgaggtggtcgaacgccagctccagcccggcgggcagttcgtggtccagcagccacagatcgagatgatggctgatgtgcgtcagcagcgtgcgtttgggctgcagcaaccgctgcgtctcctgcgcgcgggtcagatcgttgtggttgcgcggcgcctgcggctgaggcggcaggctgcagtcgagcaccagcagatccagcgccacgttctgcagatagccgacggtggccggcggcaggccgacggtgtcggtcaggtaggccagcgcagcgcccgccgcctggatcagatagccgtgggtcagtttggagtgttgcagcggcagtggggtgatgcgcatgccgcccagttcgacggtggcgaagggcgccagcggcggctgaaatgccaaaatgccggggtgtttgaacaggtcgtcgcagccctgttcatccggcgggccatataccggaatggaatttccgcacccccaacgcaaaggaaataacccctgaacgtgatccatgtggtaatgtgtcagtaaaaaacgttgaatttgccccgccgaaaaccgccgctccaaagccggtaatcccgcatccaataaggtcgtttccccctgatagttgagcatggcgctgcacgctcgccgccgaaatgccggctcgcgccgcgcccgttggcagatagggcagtcgcagccgaacaccggcacctgctgcgcgccgccggtgccgagaaaggtcagttgcatcgctcccctccgttaaaggtacttctgcgcaaagcggttaatgtcgcgaaaatccgccagccgcgcctgcagcgtggcgtgatcccagtgccaccactggctgcgttcgatgcgttctatcagcgcgtcgtcaaagcgcatgccgatcttcttggccgccacgccggcgacgatgctgtagggctccacgtctttggtgaccaccgccgcgctgccgatcaccgcgccgttgccgacgctgacgcccggcatcaggatggcgttatggccgatccacacgtcgtggccgacggtgacgtggtgctcgcgccgccagtcgaagaacgctgcgtcatcttcccccagcccgtattcggaagcgcggtaggtgaagtggtgctgcgcgatgcgctggtaggtcgggtggttgccgggattgatgcgcgcataggaggcgatggagacgaacttgccgatagtggcgtaaaagatctggttgtgcccggcggtgtaggagtagtcccccatctccacctcttccaggatcgcatcgtcggccaggtgcacatactggccgagccgggtgcggttaagggtcacgttgtcgccgattttcggctgggcgaagtcgttcatggcgtcgcgtcctgagtttgtcgggtagaggtcggcagcagcgccagcagcgccgccagggtgtcgtcgagtgggccgtcgttgtgcagcacccggcagccggcgggcaggctctgctgatattccgccgcccgcgccagccgctgctcgatctgttcggcgctttctcgcccgcgatcctgcaggcgccggcgcaggatcgcggtgctgacctgcaggcataccggcagcagctgcgcgccgtagcgctgctgcgcctgcggcaggtgggcgcgcgaaccgttgaccgccacgtcgatcccctgcagcagccaaagatccacctcgatcccgaacgcgtagcgctgctggtgcgcctgccagtcgagcgcgaacagccccttggcgcggcggcgcagaaattcgggttcgctcagcgcgatgtgattctcgcagccggcgtccgccggccgggtgatgtagcggtgcgccaccagcggcgcgcggtcggcgtcggcccgcagcgcggccagcaggctgtccttgcctgcgccggaaggccccatcagatagatgagccgcgccatcagaacacctgcctgccctgacgccacacgttctgcacgtaaacgtgctcgccgtgcggccgcgccagcaccagatccgcccgcaatccttcggcgagggtgccgcgatcctgcagatccagcgcccgcgccgggttgcgggtgatcatgcgcaccgcctggggcagatcgtaggcgttgcgctcgtccgccgcgaggcgaaacgccgcgtccagcaagctggccgggtaataatcggaagagagaatatccagcacccccagcgccgccaggtggtgcgccgccacgttgccggagtgggaaccgccgcgcacgatgttcggcgcgcccatcagcacctgcaggccctgctggtgcgaggcgcgggcagccgcctcggtggtggggaactcggcgatggcgctgcccagcgcgcaggattcggccacgtgcgcggcggtggcgtcgtcatggctggccagcgagatgcggcgcgcgcggcagtgggcggcgatcgcctcgcggttcggcgcggcccagcgggcggacagggcgacctgctgctcctcgtactcgctcatctgctggtcgttgaggtggtatttgccctgataatattcgcgatacttttcgcgtgaggcgaactggcgctggcccggcgaatggtccatcagcgacaccagcgacacgcccggcttgtccatcagctgttcgaacagcggcagggtgctctcgtgcggcagctcgcatcgcaggtgcagccgatgctcggcgcggttcaccccggcgcgctggctgtggatcaccgcgtcgatcatcttctgcaggttttccagccggtggccgccgtcgcgcacgtcgccgatcgccaccgcgtccagcaccgtggtgatgccgttggccaccatcagcgcatcgtggctgctcatcgccgaatgggccggccagtcgacgttcgggcgcggggtgaaaaacttgtccaggttgtcggtatgcagctcgatcagccccggcagcagccagccgccgtcgccgtccagcgcctgcggcagccggctcgggccgtcggcgaagctgcggatcacgccgtcctgcatctcaagcgagccttgcaccacctggtcatccagcaccagcttaacgttattgacgatcatcagagggcctccagcgcctgcggcgcctgcatatcataaagccggtcggcgacctgtcggcggacgccttcatcgtgaaaaatgccgacgatcgccgcgccgcgcgccttggcgcgttcgataagctgcaccaccgccgcgctgttgcggctgtcgagcgaggcggtcggttcatccagcaacaggatggggtagtcgacgataaagccgcgcgcgatgtttacccgctgctgctcgccgccggagaaggtggacggcgccagcggccacaggcgctgcggcacgttgagcgcagcgagcagcgcttcggcgcgttcacggcactcgacgcgctcgacgccctgttccagcaagggttgcatcaccacctccagcgcgctgatgcgcgggatcacccgcaggaactggctgacccagcccagcgcatggcggcgcacggccagaatctggcgcgcgtcggcgctgaccatgtccagccagtcgccctggtggttgatccagatatggccgctgtccggcaggtagttggcgtacagcgagcgcagcagggtggatttgccgctgccggagtggccgtgcagcaccacgcattcgccgccgtggaccgtcaggttggcgtcgtgcagcaccggcaggcgggtgccgtactgctgatgcagcacaaaggttttactgagatgttcaactcggatttgcatagtcatctgttatcgccttgggttacgacagcaccgaagaaaccagcagttgggtgtaggggtggtgaggatcgtccagcacccggtcggtcaggccgctctccaccacttcgccctgtttcatcaccagcaggcggtgggccagcagccgcgccacgccaagatcgtgggtgacgatcaccgccgctagctgcatctccaccaccagattgcgcagcagatcgagcaggcgcgcctgtaccgacacgtccagcccgccggtcggctcatccataaacaccagcctggggtgggtgaccagattgcgggcgatctgcagccgctgctgcatgccgccggagaaggtggtcggcagatcgtcgaggcgcgacagcgggatctcgacgtcttccagccactggccggcctggcggcgaatgtcgccatagtggcgctggccgatggccatcagccgctcgccgatgttgccgccggcggagacctgcggccgcagcccgtcgagcggatgctgatgcaccacgccccagtcggtgcgcagcaggcggcggcgatcgctctccgccatggcgtacaggtcgtgctcctggtccgcctgagggcggtaaaggatctgcccgcgctgcggcgccagccgcgccgagatcgacttcagcagcgtggttttgccggagccggattcgccgacgatgcccagcacttcaccggggtagatgtcgaacgacacgtcgctgaagcccttgccgggggcgtacaggtgggtgagccggttcaccgacagcagcggggtggtgctcaaaggggtggaagtcatcagtgctgcgcctcttgcgaagattgcgccagctgctgccggcagtagtcggtgtccgaacagacgaacatgcggttgccccgatcgtcgagcaccacctcgtccaggtagctgtggcgcgagccgcacagcgcgcagggttcgtcccactgctgcacgctgaacggatggtcgtcgaagtccaggctctccaccttggtgaatggcggcagggcgtagatgcgtttctcgcgcccggcgccgaacagctgcagcgccggcatcatgtgcattttcgggttgtcgaatttcgggatcggcgacggatccatcacgtagcgatcgttgaccttcaccgggtaggcgtaggtggtggcgatatggccgtagcgcgcgatgtcctcatacagcttaacctgcatcacgccgtactcctccagcgcgtgcattttgcgggtctcggtttcgcgcggttcgataaagcgcagcggctccgggatcggcacctgatagatcaggatctggtcttcgcgcagcgcggtttccggaattcggtgacgggtctggatcagcgtagcctccggcgtgcgctcggtggtttccaccccggcgacgcgctggaagaagcggcggatcgacaccgcgttggtggtgtcgtcggcgccctggtcgatcaccttcagcacgtcggcgcggccgatgacgctggcggtgagctgaatgccgccggtgccccagccgtagggcatcggcatctcgcggccgccgaacggcacctgatagccggggatcgccaccgccttcaagatggcgcggcggatcatgcgcttggtctgctcgtccagataaccgaggttatagccggtcaatacttcactcatcgcgggcctcctgacgctcgctgtattcctgtcgcagccgcttgagcagctccagttcggcctggaagtcgacgtagtgcggcagcttgagatgggagacgaagccggcggcctcgacgttgtcggcgtgggccagcacgaactcttcgtcctgcgccgggccggcgacgccttcgccgtagtcggggctttgcaatgcgcgatccaccaacgccatcgccatcgccttgcgttcggcgcggccgaacaccagcccgtaaccgcgggtgaagtgcggcggatggtccttgggatcgacgaagccgttgaccatttcgcactcggtcagcaggatttcgccgatatcgatggcgaaaccgagctcttcaggcacgatctccaccgaaacgtggccggtgcggatctcgccggcgaacgggtggttgcggccgtagccgcgctgggtggcgtagccgagcgccagcagaaaaccttcgtcgccgcgcaccagctgctgcaggcgcgccgagcgcgagcaggggtaaaccggcggggtgcgggtgatgtcgtccggcgcgctgccgtcgtcctgttcctcccgcgccagctgctggcgacacaacagatcgaacacgtggctgcagttgtccggcagcggttcgtcggcctgcggcgcgcgcggcgcctcgccttccgccagcagcgcgaaatccagcagccggtgggtgtagtcgtaggtcggccccagcacctgcccgccgggcaagtccttgtaaaccgccgagatgcgccgctccagccgcatgttttcgctggccagcggttcgctgaccgccaggcgcggcagggtggtgcgataggcgcgcagcaggaaaatcgcctccaccagatcgccgctggcctgtttgatggccagcgccgccagctcgcgatcgtagatgccgccttcggtcatcacccgatccaccgccagccccagctgctgttcgatttgttccgcgccgagcgccggcagcgcctcgtcgccgcgccgcagctgttcctgcagctgatgggcggcctcaatggctttttcgcccccttttaccgctacgtacatcagcacacctccacgcgggtggtccgcgggatcgccagcaggcgatcgccgcaggtcagcaaaatatccagccccagcgggaagcgctgcgggcggttgaccagataatccagcagcgccggcggcaggcgcggcgctatcaggcgttgcttctcgatgccggggccggtcaggcgcagtgcggcgccgttatccagctcggcaagctgcacgatgaccgtggcgccgcattccggcgagatttcagtgccgtgcggcaacgcctgcagatcggcggcctgaacgtgctcatcgaacagggcaaagcagacctcctgcgccgtggcggccagcggcgcgccgctgtgaaaacgaatgtttgttagcacttgctcacttttaagcgccgcgcacagctgcagcggcgtttcctgatcggccagcgtcagcagcgcggcggtgctggcggcgttcagcggcgcccaggccgggccggccggcagcgtcacccggtggcccggttcgctcaaggctttaagaatcaaacggaaagcgtgctgcgattggtctatcggttgttcaaaaccggtcaataaactcatggcttaatcccctcgcaccagcgtaaagaagtccacccggctggcggcgatcgcccgggcgcgcagctggcgctgttcgtgctgcagcgcggccagcggcgcgatcagctgttgttgcaggcgttcgccgtgttccggctgttgcagcagcgcatcggccagcgcgcacagctcggcgtgcgccttgtcgcgcccggcgatatagctgtagccgtagccgccgttgtccagctgcaccaccgcgcgggtgacggtcatgtcccccagcacgaagcggcggccggtggcgcccatgcgcccctgcagctgggccaggccgatctccggcgcgcggatgctgcggtaacttgggctgaggttcagcgcctgccagtggctgcgcagctgctcgggccggctgtgcgccagcaccgacatccagcgttgtctcgactctaaggcgtgcattcagtgctccatcgtcagttcaatcatgtcggcgcgggccaggctgacggagtattccgccacgtcttcgccgccgctgcggacgttaagggtgcgcacgcacagcagcggcgcgtgggtggcgatctccagcagccggctctctttggcctgcgcgcggcgcgcgctgatgcgcgtctggcggcgggtcagcggctgctgcaggtgctgttcgataaactggtgcagcgaaccgctgtggaactgctgcagcgccggccaccagtccagatcgggcagatagtggtcgatcacgctcatcggcacgccgttgacgcggcgcagggtgcgcaggtggatcaccatttcgccttcttcacgcgagagcgcgctggcgacatgcccattgcacgggcgcaagacagcgagtaagcgctcactggtggggtggctgccctgctcgaacaggttctggctgaagcgggtgttggcgtgcagcgggtagtcataaggccgcatcagcaccagaatgccgacgccgtggcggcgctgcagccagccgcgctccaccagctgatccaccgcgcggcgcagggtgtggcgattgacctgatagcgctcggccaactgctgttcagaaggcaggtagtcgccgcagcggtactgcgtgcgcagctcctgttccagctgcgcggcgatctgctgatagcgggtggggtaagtggtcggatgtctagacaactccatcataataaaaacctcgtcatgccgatggcggtgcgatgaaggcggaagcggtgcgtttcatcgggcgtctaccctgtggttttcaagttggcatcatggtgacgggcgcagatgacaatcgcgttacgcctcggtggcgaacagatgaactatttaggacagcccgggcgtgcacgagcggcggcggcgcgctatgctggcgccactgttgactgactctggccgctaccatgccgcaacctctgaacgcccctgaacacgccccacgcgcctggccgctgtggaaaccgatcctgtttctgctggtggtggccgttggcctctactacgtgaaatggcagccttactacggcaaggccttcgtggcggcggacagccactcgatcggcaaatcgatcctggccgacggcgccgcgagcccctggctggcggcctggcagtacgcgctggtctacttcaccgcggtgtggaaggcggcgctgctcggggtgttgttaggctcgctggtgcaggtgctgatcccgcgcgactggctggcgcgcacgctcggccaccggcgtttttccggcaccgtgctgggggcgctgatcgcgctgccgggcatgatgtgcacctgctgcgccgcgccggttgccgccggcctgcgccgccagtcggtgtccagcggcgccgcgctggccttttggctcgccaacccggtattgaacccggcgacgctggtgtttatggggtttgtgctcggttggccgttcgccgccatccgcctggtggcgggcgtggtgatggtgctgggcatcgcctggctggtgcagcgcgtgaccgccaacgacccgcagcccgccgcgccgcagccgccgctgatgacggcgcagagcgacgaacggccgttcctcgcccgctggggcaaagcgctgtgggcgctgttttggtcgaccatcccgatctacgtgctggcggtgctggcgctgggcgcggcgcgagtctggctgttcccgcacgccgacggcgccgtcgacaatagcctgctgtggatcatcgcgctggcgatcgtcggctgcctgtttgttatccccaccgcggcggaaatcccgatcgtacagaccatgatgctggcgggcatgggcgcaggcccggcactggcgctgctgatgaccctgccggcggtcagcctgccttcgctgctgatgctcaacaaagccttctccgcccgggcgctgtgcctgacggcggcgctggtggcgctgtgcggcgtgctgaccggcgtggtggggatgggattggtgtaacggattcgtgacccgatgctgtctcaaggaggagatggaaatggaacagcggaataaacctgaaatggacttagaggtgatgttgcaggagcaagcgttgcgtgaaaggggggatgccgcccttgaacgtttaagaaacggcaccgcggtttatataagccattcggaggcagaaaaacgaatggctatatttaaagcgaaaattcgggaacgttatcgaggatgatgttgagctgtgctagctcacagctggacttacagtgtctaggggcgctgttggtcggctttgagcgagaatcggacgtttagcaaatattaaaattgattatcaatgttacgactgttcatactggattaattggattgtaatctactattttcatagtgtttctaccagtggttgcttgcttgaaaattgtcccaactggcatttcttcaataattaatcttttaaccttatcttccattctgtaaccaaaaataatagagctcacaaagtcagtatcataattaacctttttaaatttctcacccccgttaatcgtagccagaccttcgctagccataaatcgatattcagactcatactcccattcatctaacttacaatgaagtgcatctaatattctaatgcccaggttattgtccgttgataaatcatagaacgtcttgtataaatcaagtaattctaatgatggtatgtcatccacataactcactcttcttgcttttacatgctcagttttgtattcaatacaaaaacctcgatgagatgccgcataatgtgaccacatcagattgctatctggaatagacgataaggacataaaagcatatgaatcaattcgttcattaaatttgagattaagtttagaaatgaattcatgcccctcaattgtaaaatcacctttattcaggtgttttaacaactcttgacgtttagttttaggaagcagctttgatagctcttttatgtccttgggatttggttttactaaatctattttggaatcaaacaaatcgttgaaattagttctgcttgagaaaaccgcatactgattaaataaagcatctaaatagtaatcacttttcaggtcattataattctcaatgggtctgtatttatatataaatttagggtagttcatgcttttcttatctccataaacaatcttatcaggtttatcctgcaagggtaaaaccaataaaatggttctgcaagaggataaaaatttctgggcgatttgacctcgtaaaatcgtaacgatccgatgttttgaactctatcaattgacgatcatcctatggactcgcggtaagtccgcttctggcacggagctaacggagctgaaggtctgctttgagcgaggagcagacgtttgcgctgcctatttatattaactgttctgcttaaattctttaattctattttccacttttagaattacattggctataattcgttgtgcactttctttacttgtgtatcttaattctcccggatagtttccgctttcaactaattctgaaaacaagttatttctggatgaatcatccgggattccagcttgatcacataaagcatcaaacggactagatactccggtaagagcgatgatttccgagcctttcagtggtgatgtaagtatcacttcactttgactatctttgaaatgaaaaagaggttttgcatcctcaggatatctcttctgaaaatgtgtggctgcttcaataaagtcagagttattccataattcacatagatttacgacaacttcactttctgtaggtgtgtgctcaaaaatcgccgcagaaacagcatctactttaaaaagacctttgaatatctcagcatattttttatctaaagtccaactcactactccttcatgtttttggtctaccaaaacgatttctataagttcaccttggtgaagaaaacgctttctatagcaaggtgaggtgacacttttgaattttttatccaaacactgggttgtatccaataaatccttagctagtaagtcacgtttattctgatcttccctccatccattctgccaatttgagagtgcaaaaaaaaattcatcagtaaaacccatcttcattcctttcttattaaggggtaagttaagcaccttcgtatactttacctaactatgaattatttgaatatagtaatgtccgcttttggcacaaagcagcctgtcagattgactctgtgccatcgttgtatcagttcgaacttgggccaacacatcttgcgatgagcactatcaactcaacgcaacctatgcaccacctggttgctgctgccgcgccagatcagcgccgggtctttcaaatcctgcacgaacttgccgtcgatcagcacgttgatcctgtccaccacctgcatttgctgcgtgtccagctccgccagccggtagccggtccacagccagatatccttgccggggcactcggcgcgcacccgtttcaccagcgttaagatgctcggcacgttggccggatgtagcggatcgccgccggagagcgacagcccctggcgcggcacgcgcgtatcgttcagatcggcgatgatgcggtcttccagcgccggggtaaacggctggccggagttgagccgccaggtgcttttgttgtagcagccggggcactggtgcacgcagccggcgacaaacagcgtgcagcgggtgccggggccgttgaccacgtcgatcgggtagtactggtgataattcatgtgaggcctgcccatcaggctattttactggccattttgcctccgggcagtgctgccaatcctcacgtactgcgtgtacgctgcggttggtgcgcgctggccgaaggcaaactggttgcgacaatcacgcctgatgaacaggcttctgcataggctgcacggcgcttttcagccgagctgcccgttgccgaggtgtttcacccggcgtttcacctcttcctgcttgccggcgttgaacggccgggcatcggggctgccgagatagccgcacacccggcgggtgaccgagaccttggccgagtcgtgattgccgcatttcgggcaggtgaagcctttgctggtgcaggagaattcaccggtgaagccgcattcgtagcactcgtcgatcggcgtgttggtgccgtagtaaggcacccggctgtagctgtagtcccacacgtcttccagcgccttcaggttgtgctgcaggttcgggtattcgccgtagcagatgaagccgccgctggccaacggcgggtagggcgcttcgaagtccagcttgtcgtacggattgaccttcttctccacgtcgaggtggaagctgttggtgtaatagcccttgtcggtgacgcccggcaccacgccgaaatcggcggtgtccagccggcagaagcgatcgcacaggttctcgctcggcgtactgtagaggctgaagccgtagccggtctcgtctttccaggcgtcgacggcggcgcgcagccgcgcgacgatcgccaccgctttggcgcgcagcgcttcgtcgtcatacacgtggttttcgccgccgaacagcgcgttgatggtctcgtgcaggccgatgtagcccagcgaaattgaagcgcggccattcttgaagatatcggcgatattgtcatcggccttgagccgcacgccgcaggcgccttccatgtacaagattggcgccacccgcgccttgatgccttccagccgggcgatgcgcgtcatcagcgcctttttcgccagctgcaggcgctgatccagcagcgtccagaagcgcgactcatcgcccatcgcctccagcgcgatgcgcggcaggttgaggctgatgacgccgatgttgttgcgaccgtcgtgcaccagttcgccgtcctgctcgtaggtgccgaggaagctgcggcagcccatcggcgttttgaacgagccggtgaccttcaccacctgatcgtagttgaggatgtccgggtacatgcgcttgctggcgcactccagcgccagctgcttgatgtcgtagttcggatcgccgtactggtggttgaggccgtcgcggatggcgaacaccagtttggggaacacggcggtcttgcggtttttacccagcccggcgatgcggtttttcaatatcgagcgctggatcaggcgcgactcccagctggtgccgaggccgaaaccgaaggtgacgaacggcgtctggccgttggcggtgtgcagggtgttaacctcgtactccagcgactggaaggcgtcgtaacactctttctcggtgcgcgccatggcatagcctttggcgtccgggatctgccattcttccgccacctgcaggtgtttgcggaagctctcgtcgacgaacggcgccagaatttcatcgatgcggttgatggtggtgccgccatagatatggctggcgacctgggcgatgatctgcgcggtcacggcggtggcggtggagatcgacttcggcggctcaatctcggcgttgcccatcttgaaaccgttggtcagcatgcctttcagatcgatcagcatgcagttgaacatcgggaagaacggcgagtagtcgagatcgtggtagtgaatttcgccgcgttcatgggccagcaccacgtcgcgcggcaggatgtgttgcttggcgtagtgtttggcgacgatgcccgccagcaggtcgcgctgggtggggatcaccttgctgtccttattggcgttttcgttcagcagcgcgcggttgctctgctcgaccaggccgcgaatttcctggttcaggcggccgcgcagctcgcgcgccacgtcgcgatcgtggcggtattcgatataggcgcgcgccagctgtttgtattcgccggccatcagctggttttccaccgcctgctggatctcgtggatatcgacgcgcggctgctgctccatgcgctgagcgaccacgcgggcgacggtggcgcagtagtcggcgtcgaccacgcccaccgccagcgcggcgcgctcgatggcctgcgcaatgcgcgcttcgtcaaaaggtacctggcaaccgtcccgcttaatcactactggtttcacgttgtactccttgttccccgagggagcgttgatacccgcctggcgcggcgagcaaccgtcaaatttcgcttatccacagggcaaagccgcagcgcgcaagggctgtggcgacgtgtggatgattttgtggataactactatatataggtgttcgcaattcttaatgcactatatatagatattggcgcgattcttttgatgtagaacaaggaaaacggaagagcgtgcgcaagctgaacagacgtcaatcgcccgttggccgatcgcgaaaatgttccagcagaaaatccacccagacgcgcacccgcggcggcagatccgccgaggcgtaatagagccacagctgcaccgggcgcggccagcattgcgccagcaccggccgcagcgtgccttgctcgaagtgcttttcaacgtaccagcgcgccaggttgacgatgccgagcccggccagcgccgcatccagcaacatctccgggcggctggccaccagccggccgttcagatccagcgccagcgtttcgccctgatggcgcagctgccatttgacgtggcggccgttgcccgggttacggtgcagcaggcagtcgtggcgcagcagatcgtgcggcgtttgcggctcaccgcaccgtgccagatagtccggcgaggcccccagcaccatatgcatcgggtagagcgggcgggccaccagccggctgtcgggatcgacccggctgccgatgccgacgtcgaagccttcgcccaccaggttcaccacccgggcgtccagcgacagatcgagatcgatctgcggatagcgcgccagaaattgcgggatcaacggcatcagcatctggcggccgaagccggggatcatgctgacgcgcaccaccccggccggcgcctgccgttcgccgccggcgctctccagcgtggccgccagcgcctgccacagcggcgccacctgcgccagcagcgctttgccctcgtcggtcagcagcacgttgtgggtgttgcgctgaaacagccgcagcgccagcttctcttccagcgcgcggatgtttttgctgaccgccgccggcgtcacgcccagctggcgagcggcggcggagaaattttgcgcctgcgcggcggcgaggaaggccggcaacaggcggtgcacgtcaaagggcagcgacatagtggttgatacttttggttgaaattgaagtgacctttaacagcctacacccgaagcggcggaaatggaaaaatgccctcatcttcttatgaccgaggaatcgttatgtcgcgcattttagtgttaaccgcccaccgcacccccgacgagtcgcgcatcaacaaagcgctgatcgcggcgctgagcccgttgcccaacgtgaccgttcacgaactgatccgcgcttacccggattaccgcatcgacgtggcgcgcgagcaggaactgctgcagagccatgatgcggtagtgatgttgttcccgttttattggtacagctcgccggcgatcctcagcgagtggcaggatgcggtattaacctacggttttgcctacggcagcgaaggcacccaactgcacggcaagccgctgcagctggtggtgagcactggcggcaacgcgcaggcctatacggcgcaagggtacaaccgttatccggtgcaggatctgctgctgccgttccacgccatggccaacctgaccggcatggattatctgccgccgcatctggtgcagggtgtgttcgacatgagcgatgaacgcctggcgcaagaggccgccggggtggtggcgttgctggagaaatggtagggcgcagcgctcgccgcgccctgcggggttagtcttcgagcagccaccacaccgcttcgaacggccgcagcgtcagcgcctgaggctggtctgccgagtcgctgtagttgctcatcagcgggcgccactgggcggaaggctccacgcccgccgccgtccaggcctgcggctcgcggcccaggttggccgccaccagcaggcgctggccgttccagctgcgctgatagcaccacagcgccgggtgttccggcgccagatcctgatagtcgccgtgggtcagcagcgggtactgcttgcgcagggtgatcagctggcggtaggcgtaaaacaccgagtcgagatcggccagcgccgcgtcggcgttgatctgcgggtagttctcggcgcagccgatccacggcgtgccggtggtgaaaccggcgtgcggcgcggcgctccactgcatcggcgtgcggccgttgtcgcgtgatttgtcggccaggatcgccagcagctcggcgtcgctgcggccctgggcgcgcagttcggcgtacatgttcaggctttccacgtcgcgatactgctcgatggcgcggaagccggggttggtcatgccgagttcttcgccctgatagatataaggcgtgccctgcatgccgtgcagcaccatcgccagcattttggcggccggcacccgcagtgcgccttcatcgccgaagcgtgacacgatgcgcggctgatcgtggttgcaccagaacagcgcgttccaggcgcggttatgcatcccttgctgccagtggcggaagatctgcttcagttccacgtaatccggcgccgcccgcgtccatttttcaccgccggcgtagtccaccttcaggtggtggaagttgaaggtcatcgacagctcttcgccgctctgcgccgcgtagcgctggcaatgctcaagcgtggtggaggacatctcgcccaccgtcatcaggccgcgcggctgaaacacgtcgcggctcatctcctgcaggaactcgtggatgcgcgggccgtcggtgtagaagcggcggccgtcgccctggctgtcggacgggaagtcctgctgcttggacaccaggttgatcacgtcgaggcgcaggccgtcgacgcctttgtccgcccagaactggcacactttcttcagctcttcgcgcaccggcgggtgttcccagttgagatccgcctgctcggcggcgaacaggtgcaggtagtactggccgctgtcggcgtgccactgccaggcgttgccgccgaacttggaacgccagttgttcggcggcgtatcgccttcgccgtcgcgccagacgtagaactgacgatacgggctgtggcgatcctgtgcggccttgaaccacgggtgctcggtcgaggtgtggttgaacaccatgtccatcacgatgcgaataccgcgctggtgggcggcggcgaccagctgctcgaagtccgccatcgtgccgtaagccggatcgatggcgcagtagtccgccacgtcatagccattgtccacctgtggcgacacgtagaccggcgtcagccagatggcgtcgacgcccagctcctgcagatagtccagccgccgggtcacgccggccaaatcgccgtagccgttgccggtgctgtcctgaaaactcttcggataaatttggtagatgacgccgttctgccaccagggggttgggttgctcatagctgtatacctttgaatcgtgacaacgagcctgcgcgagcaggctcctacattcatattgcgtcaattaaaccggcagctcgccgcgcgcggccttgcgtttgtagaccatgatggtcagcaccagcgggatgacgatcgccaccagaattgccagcgagtaaatcagccagaactgtggtttgatagacaggatgcccggcaggccgccgacaccaatgccgttggccatcacgccgtccaggccgcagataaggccggcgagggcggagccgatcatcgcgcacagcatcgggaagcggtatttgaggttgatgccgtacatcgccggttcggtcacgccgagataggcggagatcgccgccggcaccgagatttcacgctcgttggccttgcggctgatgatgatgatgccgagcactgccgaggcctgcgcgatgttggacagcgcaatcagcggccataccggggtgccgcccatgctctggatcatctgcatgtcgatggccagcgtggtctggtgcacgccggtgatcaccagcggtgcatacaggaagccgaacagcgcggcgcccaccggggcgaagctgccggtcatcaccgctttcaccgcccaggcgacgccgtcgccgatcatgcggccgaacggcccgatcagcgcgtgcgccaggaacaccgccagcagcagcgaaaccaccggcaccaccaccagatagagatagtcggggacgatctttttcagccgggtttcgatccagcccagcgccatgcctgccaggatcgacgggatcacctgcgcctgatagccgactttctggatcacgaaccagccgaagttccacacttccggcgtttgctggccgagcaggtaggagttcatcagctgcggcgacaccagggtgacgcccagcacgatgccgagcaccggggtgccgcccatctttttcaccgtcgaccaacagatggccaccggcaggaacatgaagatcgcttcacccagcagccacaggaagtcgtaaacggttttccacgccgggtgcatctgcgccagcgtttggccgccggacatcgggatgtcgccgatcacgttgcggaagccgaggatcagaccgccgctgatcagcgccggcagcagcgggaagaagatttcggcgaagtgggagatggtgcgctcggtccaggtcatgttctggcgcgccgccaccttggcctgttccttgtcggcctcgttgacgccggtgctggcgatcagcgcctgatagtagtcgccgacgtcggtgccgatcaccacctggaactgcccggcgttggtgaagcagcctttgaccatcggcagctcttcgatttcctttgggctggccttgctggggtcattgaggacgaaacgcagccgggtaatgcaatggctgacggtggcgatgttctcgcggccgccgaccaaaacaatcaggcgatcaatatcctgctgttttactttgctcattatgggatacctgcagaggtgttgactgagtaatgatcaaagcttagccactcggctttttgaatgaaatgggaacgttcccggtttggggcgaggatcacaaaatgacaaaaaatggtcaacttctaatcagggagtcaggaaagtttgctgggcaccaccaggcggcggatcccctgttcgccgctgagctgcgccagcagctgctgcgccgccagcaggccggcgctgccgtagccgaactccaccgacagagtgtcggggaacaggaagctgagcagcggggtgttgccgatggcgcacacctgaatggcgcgcgccggctgctgctgcaggtacttgatcgcgccgagggcgatgctgtcggaggcgcagatcagcgcgctggtgtgcgcatcgatcacttcggcggcgtgctggaaaccgctctggtaactcagctcgcccagcgtggcgcgcggcgtgagcgtgaggcgttcacaggcgtcgagataggcctggtagcggcgctggccggtggtggcgtcgctgagctgcacccccagatagccgatatgccgatgcccctgccggtacagacgatccatcaacaggttcaccgcgccggcgtcgtcgtagcagacggacgagaagccgtcgtattcgcgcaccatcaccaccattttttcctgccacggcttgagcatcgccgcggtcaggccggtgaagccgaacaggatcacgccgtcgacgttgcgctggcgcagtacgtgcaggtgctcctgcaccaggcgggtttcgaactggctctccatcacgatcgggtcgaagccctgttggtacagcagcggcagcatggtgcgcaccgcctggttctccgacggcgaatcgagacgggaaacgatgatgcccaccactttgtcgctttggccgcgcatggcgcgcgccgacttggagggggtaaacccttgctgacggatcaccgcttccacccgttcgcgggtttgcgggctcacgctgccttcattgttcaacacgcgtgagacggtggatttgcctacgccgctcaggcgcgcgatgtccttgatggtcagccggttttgcatggtttacttttcgttgaggtggacaggcgtaacataatggcctgtaaaacaatgcccgtcagcatagctcattttccgacgcggatcttgatgcaaaacgggattgttgcactgcgctgaacggccgctcttgccgctctgtttttccctttaccggaggttataccccatatggaccccgacccgactgctttagacactcactcggttctccggtaaaacctctccgcctggcgctgctgttttaccggtgaaaaacatcacggtaaccggtagcgcgcgcttcgtcgttcgctcctgctgctgaaaaaaataataaggatctgcgttggcagaggctttttggcgcatccgccattcgcccggccgatgacgatccccgtttacccgctgccgtgaggcaccgggcgacgaggtgcgaaccatgaaactgaaaaaactcccccgtcagctgctgggcctgttcgtccgcggcctcccgcgccgtttggtgcgccgcgacagcctgctggacggcgtcagcggcgctgcgcgcgatatgccggccggcctggcgcagcagcggctggaatgcgccgccgcagagacgatgcagctgtttgagcgttttcacagccacccggaaggcatcaccgcccatgaggcggaacaggtgcgccagcgctgtggcgagaacgtcatcgacgatcagcagaaagaggcctggtggcagcacctgtggcactgctaccgcaacccgttcaacctgctgctgaccgcgctcggcatgatctcttacgccaccgaagatctcaccggcgccttggtgatcgcgctgatggtgctgatctccacgctgctgaacttcatccaggaggcgcgctccaaccgggcggccgatgcgctgaaagcgatggtgagcaacaccgccacggtgatccgcagcgatgcgctcaccggcaggagcgagcatgtggagctgccgatcgcgcagctggtgccgggcgatatcatcaagctggcggccggcgacatgatcccggcggatctgcgcgtgctgtcggccaaggatctgttcatcagccaggcggcgctgaccggcgaatcgctgccggtggaaaaatccgccgcgccgcagtcgccggcggccgatccgctcgactgccggaacctgtgcttcatgggcaccaacgtggtcagcggcaccgcgctggcgatggtgatcggcaccggcggcagcacctatttcggccagctggcgcagcgcgtcaccagccaggatgagcagccgaacgccttccagagcggcatcagcaaggtcagctggctgctgatccgttttatgctggtgatgacgccgatcgtgctgctgatcaacggctacaccaagggcgactggtgggaggcggcgctgttcgcgctgtcggtggcggtcgggctgacgccggaaatgctgccgatgatcgtcacctcgacgctggccaaaggggcggtgaaactgtcgcgccagaaggtgatcgtcaaacggctggacgccatccagaacttcggcgcgatggacattctgtgcaccgacaagaccggcaccctgacccaggacaagatcgtgctggagcgccacaccgatgcgttcggcgccggcagcgagcgggtgctgcgctacgcctggctgaacagcttctaccagaccgggctgaaaaacctgctcgacgtggcggtgctgagctgcgcggagcagaatcggcagccggaggcgctgcaaaactaccgcaaggtggatgagatcccgttcgacttcgtgcgccgccgcatgtcggtggtggtggccaaagacaacgagtatcacgagctggtgtgcaagggtgcgctggaagagatgctggcgatttgcagccacgtgcgccacgaagacgaggtgatcccgctcagcgaggcgctgctggcgcgcattcgccgcatcaccgacgatctcaaccagcaggggctgcgggtggtagcagtggccaacaagatcctgccggcgcaaacccatgaatacggcgtggcggatgaatcggatctgatcctcgaaggctacgtcgctttcctcgatccgccgaaggagagcaccgcaccggcgctggcggcgctgaaacagaacggcgtcacggtgaagatcctcaccggcgacaacgagctggtggccgccaaagtgtgccgtgacgtcgggctcgaggccgatcatctgctgcgcggcagcgagatcgagcagatggacgacgagcagctggcgcaggcggcggcgcgcaccacggtgttcgccaagctgacgccgctgcacaaggagcgcatcgtcaaactgctgcgccgtcaggggcacgtggtgggctttatgggcgacggcatcaacgatgcaccggcgctgcgcgcggccgacatcggcatctccgtcgattcggcggtggatatcgccaaggaagcggcggacatcatcctgctggaaaaaagcctgatggtgctggagcagggggtgatcgaagggcgccgcaccttcgccaacatgctgaaatacatcaagatgaccgccagctccaacttcggcaacgtgttcagcgtgctgatcgccagcgccttcctgccgttcctgccgatgttgccgctgcacctgttgattcagaacctgatgtacgacatctcgcagatcgctatcccgttcgataacgtcgacgacgatcagatcacccagccgcagcgctggaactccgccgatctggggcggtttatggtgttctttgggccgatcagttcaattttcgacgtgctgaccttcagtctgatgtggtgggtgttcaaggccaatacgccggaaatgcagacgctgttccagtccggctggttcgtggaagggctgctgtcgcaaacgctgatcgtgcacatgatccgcacgcgcaaaattccatttatccagagccgaccgtcctggccgctgtgcatcatgacgctggcggtgatcgccaccggcatcggcctggtgttctcgccgctggccggcttcctgcagctgcaggcgctgccgctcgcctacttcccgtggctggtactgatcctcgccggttacatggtgctgacccagtgcgtgaaaggctggttcgtgcgccgctacggctggcaataacccgttcgccccctccggccgggagggggcaactgtgatcccgtccgctttttcaccgcaacggttggacatctgttctgtgctgagtctttatctacagcgttggctgttttcccctgcgcctttcaagccaccgcgttgttggctgtacgcccgccccccagttacttagcagacctaagcgcctggggatgcgggcgcttgccgcctagcggtggtttgaaattcattggggatattttgtttttttcctctgaggaatttccgatgcacagacctttccgttatacgctactggcttcatcgttatggttttcttgcggcgcgctggcgcagccggctggcgatctgccgctgatgccctggccgcagcaggttgaagtgacgcaaccggcgggcaaactgattttggatcaccggctgtcgttaagcctccagggcgatgatttgggcgacgcgctgccgcgctggcgccagcgcatcgaactgcagaccggctggacgctggcgccgagggaagaagcgaacggcgcggcgatcaaggtggtgatcaaggatcgggtggcggcgcagccgctgccgggcagcgacgaaagctaccggctggcggtcacgccgcagggcgccacgctgaccgccaacacccgcttcggcgcgctgcgcggcatggagaccctgctgcaactgctgcagaccgatgggcaaaacactttcctgccgctggtggatattcgcgacgtgccgcgttttccgtggcgcggcgtgctgctggattcggcgcgccatttcctgccgctgccggacattctgcgccagcttgacggcatggcggcggccaagctcaacgtattccactggcacctgaccgacgatcagggctggcgcttcgcctccgagcattaccccaaattgcagcagcaggccagcgacggcctgttttacacccgcgagcaaatgcagcaggtggtggcttacgccacggcgcgcggcattcgcgtggtgccggagatagacatgccggggcacgcctccagcatcgcggtggcctatcccgacctgatgagcgcgccggggccgtatcgcatggagcgcgagtggggcgtgcataagccgacgctcgatccgacccgcgacgaggtttatcagtttgtcgacgcgatcgtcggcgagctggcggcgatcttccccgatccttatctgcacatcggcggcgacgaagtggacgccagccagtggcgggcgtcgccgtcgattcaggcgtttatgcagcagaacgggctggcggatacccatgcgctgcaggcctacttcaaccagaagctggaaaagatcctcgagaagcaccagcggcagatggtcggctgggacgagatctaccacccgtcgctgccgcgctcgatcgtcattcaatcctggcaggggcaagactcgctgggcgccagcgcgcaggatggctatcagggcattctctccaccggtttctatctcgatcagccgcaaagcaccgcctatcactaccgcaatgaaattctgccgcagccgctgggggtcgagacggcggtgcagcccggcgagcaggcgcaaagctggtgtttcagcatgccgcgcctgaagggaagcgcggtggaaggcagcttcatgctgatcgagggcaagcagggctggcgcggctttatcgatttcaacggcaagtcacgccgcgcggtgcacgacatcgtctggcgcacgccgcagcaggtgacgttccgcgtcgatacctggatgggcgacacacggccggtgtttacgctgcaacaggacaagctcagcggctatacgctggtcggcaacgtgcgttaccccaccagcggcgacaagctggcggcggcgccggcgggcaagatgccggtggtgccggacgagaaggggcaggccaacattctcggcggcgaagcggcgctgtgggcggaaaacgtgcgcgcgccgctgctcgatctcaagctgtggccgcgcgccttcgcggtggcggagcggctgtggtcggcgcaggacgtcaccgatgaaagcaacatgtaccggcggctggcggcgatcgacgcctggtcggtggtgtcggtcggcctgcagcagcacgcggaaacggcgcgcgaattcacccgcctgagcaacagcgtgcagatcctgccgctgcagatcctggccgaggcggtggagccggcgcagtattacacccgccagcacctgaagttccaagccggcaactatcaccagttcgaaccgctgaaccgctttgccgatgcgctgccgccggaaagtgaggcggtgcgcgccatgcatgcccaggtcgcggccttgttgcaggacaagcgcgataaggcggcggcgcaggcgctgcgcgaacggttgcagcgctggcaggcgaacggcgcggcgctgcagacggcgatcgcgggcaaccgtgcgctgcgggagctggcgccggtggcgcaggacgtcgatgccctggccgcattgggcttaacgctgctggagcgccatcagcagggcaaaccgctgagccgggccgaagcagaacaagtgcagcgccagctggatgcggcggcgcagacgcgcgacgaagtggtgattgcggcggtgtacccgctggaggcgctgctgcgggggctccagccgcaatgaagcggacgggctcgtgtgagcccggatccctacagctgcagcggcggcaactgggtaaaaatgctgaccagcccttcgccccagcccttgcggatggcgctgaagtacggatgatcttcggtaatgcggtattgccgggcatgactgaagctgtcgcgcgggtagatcatcacgtcgagcggcagcccgacggacaggttgctgcgtaaggttgaatccagtgaaatcagcgcgcattgcatcgcttgttccagcggcgtgtcgtagtgcagtacccggtcgatgatcggtttgccgtatttgctttcgcctatctgaaaatagggcgtgtcgcgggtggcttcgataaaattgccttgcgggtagatatggaacagccgcatctcttccccgctaatttggccgccgagcagcaggttgcagctgaagtcggtggtgctgccgctttgctgcgcctcactgtcgcgctggatcacctcgcgcaccgtttcccccaccagcgtggcggcgtcgtagaggctgggagcgttgagcaggttggggcgttcggcgtccttgctgcggtgcaacagtaaactgatgatgctctgagtggtcgccaggttgccggcgctttgcagcaccagcgtgcgatcgccgtcctgttggaacacgtgcagtttgcggaaggtggaaatatgatccaccccggcgttggtgcgcgaatcggacgcaaagaccagcccggacgacaaacgcatggccacacagtaggtcatactacaatccctcaaaacaagactggcacgccgccaacgcgcagcgtgcccgaaacatttgccatcggcaagcggctactggccggttggcatcatttgtacggcggcgatggcgctcatgtcttcgcagccgccgcccaaccgcatgccgcgcaccgggcaggcgtccagataatcgatgccgaccgccagcttaaggtgctgatttggcatgcgcgtattgttggtcacgtcgaagctgtgccagcgttcctccacccacacttccgcccaggcatgggtggcgacatgggtcgagtcttcgctgtacaggtagccgctgacgtagcgcgccgggatgttcagactgcggcagcagctcaggaagacatgcgtatgatcctgacacacgccgctgccggcggcgaacgcctcggcggcgctgtcggtcacgcgcgtggagcctgggctgtaaggcatcttcagcagcagctcgcccatcagatgttccaggccgctcagcaccgcctgcggttggtgataacgcagggcgaaggcctgaatggcgtcatcgggctgggtcagcgggctatggcgcagaaataccagcggcgacagatgcccgagcgcccgatcttcgacgccgtcttcaatctccacttccccgagcacccgaatggtgatggcctgatgcggttcatcgagcgtcagcacgtgcagtacgttgccgaaggcgtcggtggtgcgcaccgcgtcatccggcaacgacagttgccaggagaggatgcgctgatgcggcgaatcctgcggcgtcagccgcagatattgggtgctgcgctgcaccggctgggcgtagcgataatgggtgttgtgctcaatattcagtttcattgcgcctccagataagtgtgatggatgctttcggcgatgccgttcacctggccgagaaaggcgctcaaccactctcccaggccgatcttgttcagatccttcatgctgctgaagcgcagctcggcatgcagggtgtgtgccagacgtcgcggttggttggcgccgccgccgatcagttccaattgctgcaccatgtcgccgacgcaggccagcagtgaacgcgggatttcattgcgcagaatcatcagttcggcgatggtctcgcggctcaacggctgcttgtagatgctgtggtaggcttcgcgcgcgctcaccgcccgcagcagcgtgtccatgcggtaatattcgcgcaccgggtcgccgtcgatgtccatcagcgtgttcttcacctccagcagacgggcggtgccgtcggcccgctccagcagggtgccgagacggataaagcgcatggcgtcgctgcgcagcagcgtgccgaacatggcgccgcgaaacagatgggcgcgctccttcacccagtcgaagaaggcatcggcgcccaccgagccgatgccctggcggcggatcagtttcatctctatccaggtggcgttgatgcactcccagacttcggacgacaggctgccgcgcaccgcgtgggcgttgttccagcccatttgcaggcagctgaagatgctgctgtggttgcggttgtcgagcgcgaagaaactgaccagattcggcatcgtcaattccgggtaggcggcggcatacagctggccggtgccggtcagattgagcggcacctgcagatcctgatcgccgccgtcgcggatcggcatcatcgacagcttgttggtgacgtccagcacccgggcgatgctttccgcccgctccagatagcgggccatccaatagagttcactggcggtgcggctcagcataggtcgtcctccaatacccaggtgtccttggtgccgccgccctgcgacgagttcaccaccagcgaaccttccgccaacgccactcgggtcaggccgccgggcaccaggcggatctccgcgccgctgagggcgaacggccgcagatcgatatgccgcggcgccagaccgtcgttgacgaaggtcgggcaggtggacagcgccagcgtgttttgcgcaatgtaattctgcgggcgagccagcagcagcgcacggaatcgggcgagctcgtccttgctcgccgtagggccgatcaacatgccgtagccgccggcgccgtgcacctctttcacgaccatctgttcgaggttggccagcacatacgacagttcgtttttatgtcggcactgccaggttggcacgttgttgaggatcggttcctcttgcaggtagaagcgcaccatatccggcacgtaggggtagatcgatttgtcgtcggccacgccggtgccgatggcgttggccagcaccacattgccggcgcgatacaccgacagcagccccggtacgccgagcatcgagtccggccgaaacgccagcggatcgaggaaggcgtcgtccacccgacgatagatcacgtccactttgcacggcccggcggtggtgcgcatgaacaccgcgccgtccttgacgaacagatcggcgctttcgaccagctccacccccatctgctgcgccaggaaactgtgctcaaaataggcgctgttgaagcggcccggcgtcagcaccaccacggtgggatcgttgatgggcgagctttcgcgcagcgtttgcagcaggtgcgacgggtagcgctccaccggcgcgatgcgttgccgggcgaacagttccggatacagacgcatcatcattttgcggttttccagcatgtaagagacgccggacggggtgcgcaagttatcttccagcacgtagtattggccgtcgctgttgcggaccatgtccacgccgacgatatgcgcatagatatcgcgatgcagatcaacaccttgcatacagggttgatactgatcgttggccagcacctgttctgccggaatgaggccggccttcagaatatgctgctggtggtaaatgtcgtgcaggaaagcgttgagcgcctgtacgcgctggcgaatgccgcgatcgagcatcgcccattcggcggccggaataatgcgcggcacgctgtcgaacgggatcaaccgctcggcgccgtcatcgtcgccgtagacgttgaaggtgatgcccacccggtgaaacagcagcgcagcctcttcccgcttgcgttgcacggcctggtgatcggcctgctgcagccattgccagtaggcgtcgtagtggccacggtgttttccctcagccagaagcatctcatcaaaaaacggtgaagcggaaagattgatattcagcatcgtcacctcgtcgacattgcaggctgtcaatcaatcgagcataaaacgtgccaaggcgataacgggcgaaaatggcgcagagcggggctgccgcgatgaaaaacgcccgtttgcggtgcaggtgcggcctagcgacgccttaatatagggcgaaatggcggtggcggtgagcgctgaaggcgcagggacggcaggctgtcggggcagagcagaaataaaaacggccagtctgcactggccgtcattcgcgtgcgcgtcgattaacgacgcacggcgatggcttcgatttcgatcttcacgtctttcggcagacgcgccacttccacgcaggagcgggccgggaacggcgcgctgtgctcggtgaagaaggcttcgtacgcggcgttgacggtggcgaagtcgttcaggtctttcacgaacacggtggttttcacgatgtcggcaacgctcaggccggcggcttcgacgatcgccttgacgttttccagcgactggcgcgcctgagcggccacgtcgtcggcgacggcgccggttttcggatcgaccgggatttggccggaagtgatgatcatgctgcccagatcaacgccctgcacgtaaggaccaatggctgccggggcgagttcagtgctgatgttacgtgacatgttttctcctgataaacgaggattgttctatccagaaatcccattatagggcgtcaccgggagaataacagcgccatctcccggcgcccataccgggcttagtcggcctgcagcaccacctggtgctcgaactctttttcgcagtagcggcacttcaggtgcacttcgccgccgcgcgatttgacgctgaagctcgacgccactggctcgctgcggctgatgcagttgccattcgggcaggtcagcacgccgtcgatgtggtccggcaggctaagggtcagtttgcgcaccacttcatagttgtcgatgcggttcaccgtggccttcggcgcgtacatcgccagctggttggcctgctgctcggtcaggaaggtgttctcgatcttgatcagatccttgcggcccagctcgttggaaggcaggttcaggccgatggtgatgcgctggtcggtggcggtcagcttgaacagcgtcagcagtttgaaaccgatctgcgccggaatgtggtcgatcaccgtgccgcatttgatcgcttcgacctgcagtttgttgtcgtgagtcatggcggttcccccttaaagagccaaatctgcgttgagcaccagcgccagcagcgcctggcgggcgaagatgccgttgcccgcctgctggaagtagtaagcgtgcggcgttttatccacgtcggtggcgatctcgtcgatgcgcggcagcgggtgcagcaccttgaggttggcgcgcgcgccggccagatccgcggcgcgcagcacgaactgcgccttcacgttggcgtactcggacggatcgaggcgctctttctgcacccgggtcatgtagagaatatccagctccggcaccacttcttcaatgctgccgtgcaggctgtactcgatgcctttctcgtccagcattttcaggatgtaggccggcatcgccagcgcgtccggggcgatgaagtagaagcggttgccttcgaacttggccagcgcctgagtgagcgagtgcacggtgcggccgtacttcaggtcgccgaccatggcgatgctgaggttgctcaggcggccctgggtttcctggatggtgaacagatccagcagggtttgggtcgggtgctggttggcgccatcgccggcattgagcaccggcacgttgccggagaactccgaggccatgcgcgccgcgccttcctgcggatggcgcatcacgatggcatccacgtaggtgctgatcaccgagatggtgtcggccagggtttcgcctttcttgccgagcgaggtgttgctgccgtcggcgaaaccgaccaccgaggcgccgaggcggtgcatcgaggtttcgaacgacaggcgggtacgggtcgaggcttcaaagaagcagctggcgatcaccttgtgtttcaacagttccggctgcgggttgtctttcagaccggcggcggtgcgcagcaccagctccagatcctcgcggctgagatcgttaatagagatgatgtgtttgtgatacagcgggttggccatttttcactcctcctcgacgcgtgcccgtggcgcgggactttgggatattctcaaggcaaaaaaaagcccctcaatgaggggcttgaaacgatcggtttagcaacaggagaaacaacggcagctggccgccgataggcagtcggttttgtcgattgcggctaacaaaacaaacgtcgtttttcatgctttctcctggcaaattgtggcgcattatactcgcgctttttgccactgcaagcgttaaaacgccgttttttgccgccccgcaatcgattggccggcgatggccgcccgccggctatttgctgacgcgatcgtagtagaccatgtcggcgttcagcccttgttgatagcctttgacgttgtcgcgcagcaccacttcggttttggcctgatcgataaacacgtacggcgaactgcgctgcagctcctgctgcatggcggtgtacagcgcgcggcgcttggccggatcggcttcggccagcgccgccagcgtctgcttattcaactgcgggatctgccagccgttcagcccggccaccgtgctgctcttgccgtcgttgtaggcgaaggcgctggcgttggagtgggcgtcgaagtaatccgggatccacaggcggatcgccgcctgatgctgcctggcgcgcacgcgggagtaaacctggctgcccgcggccggcagcagctcgatcttcacgccggcggcggcgaagctgccctgcagcgcctgcgcgatggtgatgaacggcggtttgttctccacgtccagcgtaaaggcggcgtgggtgatgcccgccttggccaggatggctttcgccttggccggatcgtagctgaacgggttggtctccagcgcgcccggcagcccgaccggcaggaagctctggtgcacgaagtattgtcccttcagcagatccttcgtgatgccttgataatccaccaggtagcgcgccgcctcccagaaggccgggttgttcagcagcggattggcgccgttgccggcgttgaacaccaggtagttttgttcggcggacgggatctccagcaccttgacgccgggctgattcttcagcgtatcggtctggtcggcgcccagttcgcgggcgatatcggcgtcgccctgctggagcagcaggcggcgggtagccggatccggcacgtttttaatgatgatgtttttcagctgcggcttgtcgcccggcgtggcgggattggcgtccagcacgatcgcctgatgcggctgatagacgcgcatcttgaacgggccgctgccggcggagtgcatcttcagccaggcgttgccgaagtcgccgtctttgacgttggccagcgccgctttgctgtcgacgatcgaggcgatcggcgtcgagaggatattcagcgccaccgccgggctgacgtccgccgtccagcgcagctgcacggtatgttcgtcgatcttcttgagctgcgcgtcgatgttgtccggctgccaaccgagcacgttgaggatgaacgccggcgatttgttcatcttgaccgcgcggctgtaggagaagatcacgtcgtcggcggtcagcgggttgccggaggcgaacgccgcctgcggccgcagtttcaccgtcagcgttttggccgccgtatcgctttgccagctttccgccagcaccggcgccaccttggccggatcgtcgcgatccgcctgcaccaatcgttgatacaggctgggcaccgtctggatgctggagagttcgttggcttccgccggatcgaggctgacgatgtcatccagcgattgcaccaccaccagcgtattcggcggcgtggcggctaacgcggcggcgggcagggcggcgagcaggaacagcggcaagagtttggctttcatcggtgtatatcccctgaaggcgccacaaggtggcgctgagaacggtttgttatcgttggtttttacggcgcgggcgccgtcggcctgtcacggtagaacctttgccggtggtgggcaaaggtcaatgcgctatttgatattcctggaatatattagccgccctggccgggggcgccagggcggtggaggaggattgtcagagggtttcgctcagcgtggcgaccagcaccgccttgatggtatgcagccggttttccgcctgatcgaacaccacgctgtgcgccgactcgaacacttcgtcggtcacttccatgccgccgtgcagatcgtactgttgcgccatctgcttgccgagcgtggtttggtcgtcgtggaacgccggcaggcagtgcaggaacttcacgttcgggttgccggtcagtttcagcatcgccatgttgacctgatacggccgcagcagcgcaatacgctcctgccaggtctctttcggttcgcccatcgacacccagacgtcggtgtagaggaagtcggcgtcttgcaccccttcggcgatgtcttcggtcagggtgagtttcgcgccggtttgttgcgccagcgcctggcactcggccaccagctccggctgcggccagcaggccttcggcgccaccaaccgcagatccatgcccgccagcgcggcggcttccagcagcgtgttgcccatgttgttgcgcgcgtcgccgacgtacgccagcttcacttcgttcagcgccttgcccggcaggtgttcctgcacggtgagcagatccgccagcagctgggtggggtggaactcgtcggtcaggccgttccacaccggcacgccggcgtgctgcgccagggtttccaccagcgcctggccgtaaccgcgatactgaataccgtcgtacaggcggcccagcacccgggcggtgtctttcatcgactctttatggccgatctggctgccgcttgggccgagataggtcacctgcgcaccctgatcgaatgcggcaacttcgaaagagcatcgcgtgcgggtcgagtctttttcgaagatgagcgcaatgtttttgccctgcagccggcgctgttcccgcccctgcttcttggcctgtttcagatcggccgccagcttcagcagcgcctgcagttcggcgggggtgaaatccattaacctcagaaagtgacgttggtagaacgcattgccggtgctcatagtccgattccctgattgcttaattgaattaaaattcactttatatgtatgaatattcaatttcaaccccggcgaggaaatctttcacgtttatcgtggaagcaatgtcggcggtgtgtgaaaatagaaggaatgaaggccatttgacttgaggatataggcatggcaaaccgcgaattgctggaagaacaacgtgaagagacccgcctgatcatcgaagaactgctggaagacggcagcgatccggacgcgctctacaccatcgagcaccatctgtccgccgagaaatttgaggttctggagcaggccgccgttgaagccttcaagctgggctacgaagtgaccgacgccgaagagctggaagtggaagacggttcgctggtgatgtgctgcgacgtgatcagcgaagtcggcctgaacgccgagctgatcgacgcccaggtcgagcagttggtggcgctggcggaacgctgcggcgtcaactacgacggctggggcacctacttcgaagatccgaacggtgaagacggtgaggatgacgaagacggcgactacatcgacgaagacgacgacggcaaacgccactgattcctttccgattaatgcctgtgggccggctctcgccggcccctgataaacgccatgacataccaatccctgctagccccgattttaagcttcctgcactgtgaaacccccgacgcctggatcgacgccgcgcgccgtccggaaaatctgcagctattgctgaccgaccacctggtgtgtgagctgaaagccgcgcagaccggcatgtggctgatccgccgttacgtggcggacaaagagagcggcgacgcgctgttggcgctgctgcggccctacgaggcgtttctgcacgaagcgcagggcgcgccggacacgctgttccgccagggccagttcacccgcaagatcctgccgaaaaacggctcggcctacggccaggatctggcggatcgcatggtgctgttgatcaaggaagagctgcatcacttctcgcaggtgctggagatcatgcaggcgcgcgggatcccgtatcgcaagatcaccgccagccgctacgccaagggcatgatccgcgagatccgtacccacgatccggcgacgttgatcgacaaactgatctgtggcgcctacatcgaagcgcgatcctgcgaacgcttcgccaagctggcgccacacctggacgatgagctgaaccgcttttacgtctcgctgctgcgatccgaagcgcgccattatcaggactacctgacattggccgagcagatcgccggcggcgacatcagcgaacgggtggcgcatttcggccgcctcgaagctgaactgatcctgtcgccggacagcgagctgcgcttccacagcggcgtgcccgccgccgcctgaggttgaggcgcgcccttactgcggcgcgcccagcagcagatccaccgccttttccgccagcatgatggtcggcgcattggtgttgccgctggtgagctgcggcatcaccgagcagtcgatcacccgcagctgctcgaaaccgtgcacccgcagctgcggatcggtcaccgcgtcctggggcgacggccccatgcggcagctgcccaccgggtgatacaccgtcttgcagaagttgcgcacgaactcctccagctgcgcttcgtcgcgcgtccactccggctgcggcatcagcagatctttgatcagcggcttcagcgccgcggtttgcaggaaatccaggccgaacttcaccgcgcgcacgctgccggccagatcgtccgggtggccgaggtagttggcgtgcagcttgaccggatcgcgcgggttgctgctgcgcagcagcacttcgccgcgcgccttcggctgcaggtaaccgaccttgagcgtaaagccgtgaatgttcggcagcggctcgccgggcacgtcgtcccagctgtccagcagcggcaggaagtggatctgcacgtccggccggccgtcgccctggctgtcggtgaaggcggcgccttccagcacgttggacgagagcaccccgctgcgaaacgccagccactgcgcgccgtggctcagcgcctgcaggccgcgatcggcgccgaacaggctgatcggctcgcgggtgctgacgttgatcgacatgtgcagatggtcatggaagtttttgcccaccggcagatccacccgcacctcgatgcccaactgctgcaggtggtcacgcgggccgatgccggacagcatcagcagcttcggcgaaccgaccgcgccggcgctgacgatcacctctttggtggcgcgcgcggtgacttccgcgccgccattctggctgtagaccacgccggtggcgacgttgccctcgaaggtcagccggtgcgccagggcgttcagtttcaccaccagccgccgttcgtcgcgcaccgccttcaggtaggtgcgggcggtgctggcgcgctcgccgttgtgggtggtggtttggtagaaaccgacgccgtgctggctgtcgccgttgaagtcgttgcgatagggcaggttcagctcctggccggcgcggataaacgccatgctgagcgggtggcggtagcgattctcgctgaccggcagcagcccgtcggcgccgtggtagtcgtccgacaggctttcgttggcttcggcgcgtttgaagtagggcagcacctcgcggtagctccagccggtgcagccgtagcgctcggcccagtcgtcgtagtcctgcggctggccgcgcaggtagatcatgccgttgaccgaactgctgccgcccagcaccttgccctgcgcgatctgcatgcggcggttattggcgtgcggttccggctccgtttcatagggccagctttttttggcgatgatcttggccaccccggccggcatcttaatgaacaggttattgtcgtcgccgccggcttccagcagcagcacccgcgcctgggtgcggcggatcagctgcgccgccagcacgcagccggcggaaccggcgccgacgatgatgtaatcaaaggtattttccgacatgacagctctccgtgcgcgattgggatactggcagagtaacgcgggggaaaaggcggtcaatttgcgatcgttaatttattaacgaacttcacattaaatttacatcgtggtttttaacgtcagtttatctgcttgaaaaacggcgttatagcgagttttactgattgattgcgatattaataaaaaaggcgcagcaagctgcgccctgatgaagaggcgggggaggattacagcgttttcagcatggtgacttcacaatcgacgtggccggtggcgcccatcgtatggtcgatgtgttcgaagcccagatgttcgtacagcgcaacggcctgcgtcaggctggcggtggtctcgaggtaacaacagcggaagccgtgctggcgggcgaaatccagcgcctgcagcgccaggcgtttcgccaatcccttgccgcgcaacaccggcaggaaatacatcttctgcaattcgcaaatatcgtctgcgccgccctgcagcggcgcgatgccgccgccgccggcgacctggccgtccatctcgatcacccagtaagcgctgcgcggcaggctatagagctgatacagggcatccaggttgggatcggagacggtatagcctttatccgccgtcaggccgtgctcggcggagacttcgcgaatgacgtgagcaatggcggcattgtcttccgccgtgatggggcgcaccagcaggcgcgccggagttgctgttgtcatgtttacactcgccattgaaagagaccacgttcgtttttcgtttttatcgcagcgcgaaacgcgccgggggttatttcccggcggcgtccctgcagcagtaatatcttgtaataacatctaacccggcccggatgcaacggcgataaaaaaacagcggggaagaccccgctgttttcaggcgttggcgtgagccggtggattacagcgcggcgatggtcgcctgctgttcctgcagcttcactttgccttctttgcaggccgccaggcgatcgcgctctttggcgaccaccgcttccggcgcgcgcgccacgaagccttcgttcgccagcttgccttcgatcgaagcgatttccgcatccagcttgcccatctctttggccagacgcgcgatctcggcgtccttgtcgatgaaaccggccatcgggatcagcagctcggcgccgtccaccagcttggtgacggagaccgggcctttctcaccggccggcagcagcgcgatggatcccaggcgcgccaggcgggcgataaagttctggttctcctgcacgcggcgctgggcgtcggcgctgcagttgcgcagcagcacgtcgagcgctttgcttggcgcgatgttcatctcggcgcggatgttgcgcacggcgatgatggtttgcttgatccactccagatcgttcagcgcctgctcgtcttccagcgcggcgtcgtaggccgggaacggctgcagcatgatggtgtctgcggtcgtgccggtcagcggcttcacgcgctgccagatggtttcggtgatgaacggaatgatcgggtgcgccaggcgcagcagcgcttccagcacggtgatcagcgtgtggcgggtgccgcgctgttccgcttcgctgccgttgctcacgacaggcttggtcagctccagataccagtcgcagaactggttccaggtgaattcgtacaggatgttggccgccagatcgaagcggtaggtatccagcgcttcgcggtaggctttcaccgtgcggttgaattcggccaggatccagcgatccgccagcgacagcactttctcgccgccgttgaagccgcagtcgtgcgcttcggtgttcatcagcacgaagcggctggcgttccacagcttgttacagaagttgcggtagccttccaggcgcttcatgtcccagttgatgtcgcggccggtcgaggccagcgccgccagggtgaagcgcagggcgtcggtgccgtgcggctcgatgccgttcgggaattgcttctcggtgcgcttgcggatcttctccgccagctgcggctgcatcatgttgccggtgcgtttttccagcagatcttccagcgagatgccgtcgaccatgtccagcggatcgatcacgttgcctttcgacttggacatcttctggccttcgtcgtcgcggataagaccggtcatgtagacggtcttgaacggcacctgcggcttgccgttttcatccttgatgaagtgcatggtcagcatgatcatgcgcgcgatccagaagaagatgatgtcgaagccgctgaccatcacgctggtcgggtggaaggttttcagcgcgtcggtctgctccggccagcccagggtggagaaggtccacaggccggacgagaaccaggtgtccagcacgtcttcgtcctgggtcagcaccacgtcggcgcccaggttgttctcgctgcgcacttcttcttcgctgcggcccacgtagactttgccgttcacgtcataccaggccgggatgcggtggccccaccacagctgacgagagatgcaccagtcctgaatgtcgcgcatccagctgaagtacatgttttcgtactgcttcggcacgaactcgatttggccctgttcgaccgcttccaccgccactttggccagcggcgcggtgcgcacgtaccattggtcggtcagcatcggctcgatcaccacgccgccgcggtcgccgtaaggcaccgtcagatcgtgcggtttaatctcgtccagcaggcccagattttcgaaggtggcaaccaccgctttacgcgccgcgaagcgctccaggccgcggaactcggccgggatctcgttgcagtagtcggtgcagacttcgcccagggtgttgaacacttccgcttcctgacggatgtcgccgtcgaaggtcagaatgttgatcatcggcaggccgtggcgtttgccgacttcgtagtcgttgaaatcgtgcgccggggtgatcttcacgcagccggtgcctttttccatatcggcgtgttcgtcgccgacgatgcggatgcggcggccgaccagcggcagaataatctctttgccgatcaggtctttatagcgcggatcttccgggttgaccgccacgccggtatcgcccagcacggtttccggacgggtggtggcgaccaccaggtagtctttgccctcggcggttttcgcgccgtcggccagcgggtagcgcaggtgccacatcgagcctttggattcgcggttttccacttccagatcggagatggcggtgcgcagcttcggatcccagttcaccaggcgcttgccgcggtagatcagatcttctttgtgcagacggacaaacacttcgcgcaccgcgttcgacaggccttcgtccatggtgaagcgctcgcgctcccagtccacggagttgcccagacggcgcatctggcgggtgatggtgccgccggattccgctttccactgccagatcttgtcgatgaacgcgtcacggccgtagtcgtggcgggttttgccttcttctgcggcgatcttgcgttccaccaccatctgggtggcgatgccggcatggtcggtgcccgcctgccacagggtgtttttaccctgcatgcgctgatagcgaatcatggtgtccatgatggtctgctggaacgcgtggcccatgtgcaggctgccggtgacgttcggcggcgggatcatgatgcagaagctttcctggctggtatcgccgttcggcttgaagtaaccctgattctcccagtgatcgtacagcttctgttcgatctgttttgggtcgtatgcggtatcgagctgactgtttgtcttttccattctttatcgtattcagtgagttggcggcgtagccgtggtcaaatggaagccgacgctgcgataggccttgtaacggtcgcgcgccaactgtttcagagtgtcttcgtaaggaacgaagtctaccacttcatggaaagcggtagcaaaatcggcaaactgcggcagcagggcgatcagcagatcgcgcggggcgttgccgcgcttgccgggccagcacagttccaccggcgcgccgtagtgcggcccttcgccggccaggttgtgcggcacgaattcatgcggctcgcgctgccacagcgcttcgtccagccgctgggcctgctcctggctctcgcaggcgatcagcacccgcttgccggtgcgccagcgttcggcggcaacggcgcaggccacggcctcatgggcgctgagcgcgcctgacggttccgcgttgtcgagcaaataaaacgtcgcctgtttcattaaggatccaccgctgccgataaaaaaacagggcacaacatgtaggttgcgccctttttgggaacggagcagataactctaccccttcgctgctgagaggattatatacccaatagatttcaagttgcagctaggcggcaagttcgttcatccccaggagctgacatcaagtcagtgactggggtgaacgaatgcgggcaacaacgctgcggcttgaaagatgaagggtatttaatcgtcgccgttcaggcctgcacggttgagcaagaactgcgacagcagcgctaccgggcggccggtcgcgcccttggctttaccggagcgccaggcggtgccggcgatatccaggtgcgcccaggtgtacttgcgggtgaagcgcgacaggaagcaggcggcggtgatggcgccgcctgggcggccaccgatgttcgccatgtcggcgaagttggagtccagctgctcgtaatactcgtcggccatcggcaaacgccaggcgcggtcgccggcctgctcggaagcgcccagcagctcgtgcgccagcgggttgtggttcgacatcaggccggtgatgtggtggcccagggcgatcacgcaggcgccggtcagggtggcgatgtcgatcaccagctccggctcgaagcgctcgacgtaggtcagggtatcgcacagcaccagacggccttcggcgtcggtgttgagcacctcgacggtctggccggacatggtggtcagcacgtcgcccggacggtacgcccggccgcccggcatgttttcacagccggccagcacgccgatcacgttcagcggcaggttcagttccgccaccacgcgcatcacgccgtacacggtcgccgcgccgcacatgtcgtatttcatctcgtccatgccgtcggccggtttgatcgagatgccgccggagtcgaaggtcagccctttgcctaccagcacgatcggcttagcgtccggatttgggttgcccttatattccatcaccgacatcaatgattcgttctgcgaaccggcgccgaccgccagataggcgttcatgcccagctctttcatctgctgttcgccgatgacgcgggtggtgatgttggtgctgaaggcgtccgccagctgacgggcctgcgaggccaggtagccggcgttacagatgttcggcggcatgttgccgagatctttggccgccttgatgccggaagccaccgccaggccgtgctggatagcgcgctcgccgctggtgagctcacggcgggtcggcacgttgaacaccattttgcgcagcggacgacgcggctccaccttgttgcttttcagctgatcgaaggtgtagagcgtctctttggcggtttccaccgcctgacgcactttccagtaggtgttgcggcctttcacgtgcagctcggtcaggaagcagaccgcttccattgagccggtgtcgttgagggtattgatggttttctggatcacctgcttgtattggcgctcatcgagctcgcgctctttgccgcagccgatcagcaggatgcgctcggagagaatgttgggcacatggtgcagtagcagcgtctgcccgaccttgccttccagttcgccacggcgcagcaatgcgctgatataaccatcactgattttgtcgagttgttctgcgataggggacaggcggcgcggttcgaaaacgccgactacaatacaggcactgcgctgtttttccgggctaccgctttttacactgaactccatgcactctcctgaatcttaaagacaaaggcggacgctacggctagaataatcgactccgtaacgatctcccgccatttgagttaacggattatgttaacctgaacggcgtaaattgctctgttttggcgactataagcaagttcctataggacacccaaacggcttgatgttgtaatactattttagctgtgaaggttgccatatgatgagaataaatggcggattagcgatgaaattatcgattttcctgcaaaaagacaagttttcacaggcgtaataagcgtgatcatcataagatatctggtacgggaaacgctcaagagccaaatcgccatcctgttcatcctgcttctgatcttcttttgtcagaacctggtcagggtgttgggcgacgcggtggacggcaatatcccgacaaacttagtactctctctgctcgctctgggcgtgccgaagatggcgcagctcatcctgcctttgagcctgtttctcggcttgttgatgacgcttgggcggttgtataccgagagcgaaatcaccgtcatgcacgcctgcgggctgggcaaacgcaccctgattattgccgccatgatcctggcgctgttcacctctgcggtcgcggcgatgaacgtgttttgggccggcccctgggcctcgcgctatcaggacgtggtggtgaacgaagccaaggccaacccgagcatcgccgggctggcggaagggcagttcaaaccctcgcaggacggcaacgcggtgctgtttatcggcaacgtgaagggcagcacctttaacgacgtgttcctggcgcagctgcggccgaacggcaaccaacgcccgtcggtggtggtggccgagcacggcaacatcgtgcagcagaaagacggctcgcaggtggtgacgctcgacaagggcacccgttttgaaggcaccgcgctgctgcgcgacttccgcattaccgacttcaccgactacaaggcggtgattggccaccgcaccgtggcggcggacaacaccgaatccgaacagatgtcgatgcagacgctgtgggaatccgacgatccggacgcgcgcgccgagttccactggcgcctgacgctggtggtgtcggtggcgctgatggcgctgctggtggtgccgctcagcgtggtgaacccgcgccagggccgcgtgctgagcatgctgccggccatcctgctgtatctgatcttcttcctgctgcagacctcgctgcgctccaatgccggcaagggcaagctggatccgatgctgtggctgtggctggttaacggcgtttacttcgtgatcgcgctggcgctgaacctgtgggataccgtgccgatgcgcaagctgcgcgcacgcctgagaggagcggcctgatgtttggcgtattagaccggtatatcggtaaaacgattttcaacaccatcatcatgacgctgttcatgctggtgtcgctgtccggcatcatcaagttcgtcgatcagctgcgcaaggtcggccagggcgaatacaccgcgctgagcgccggcatgtacaccctgctgagcgtgccgaaagacatcgagatcttcttcccgatggcagcgctgcttggcgcgctgctcggcctgggccaactggcgacgcgcagcgaactggtggtgatgcaggcttccggcttcacccgcctgcagatcgccggctcggtgatgaaaaccgccattccgctggtgctgctgaccatggcgatcggcgagtgggtggcgccgcagggcgagcagatggcgcgcaactaccgcgcccagcagatgtacggcggctcgctgctctccaccaagagcgggctgtgggcgaaggacggcaacgacttcatctacatcgagcgcgtctccggcgataaagaactctccggcgtgaacatctaccacttcaacgatcagcgtcgcctggaaacggtgcgctatgcggctaccgccagcttcgagaacggcctgtggcagctttcgcaggtggacacctcggatctgaccaacccgaaacaggtgaccggcacccagacgctgaccggcgaatggaaaaccaacctgaccccggacaaactgggcgtggtggcgctggatccggattcgctctccatcagcgggctgcacaactacgtgaagtacctgaagcagagcggccaggaagccagccgttaccagctcaacatgtggagcaaaatcttctcgccgctgtcggtggcggtgatgatgctgatggcgctgtcgttcatcttcggcccgctgcgcagcgtgccgatgggcatccgcgtggtgaccggcatcagcttcggcttcctgttctacgtgctggatcagattttcggcccgctgagcctggtgtacagcatgccgccggtgctgggcgcgctgctgccgagcatgctgttcctgctgatcagcgtgtatatgctgctcaaacgcaagtagcggggcgaacggtagtgaagaaaggcgtggccgtggggcctcgccttttttgttggtgtggcatgccccccgcctgcggtttttgtcgtgctatagtcacttcagcagcaatgcaggagagggagcaggcagccaatggaagacgaatataatctcagcaacattatcggcaagcgcctggaggcggcattaggagagttgggcgatctcctgtgggcgtatgtggtcctatccaaaaaagacattgcctgcatctttggcgtcaccaactacccgagtgaatgggtaaaaaagtaccaagagcagggattgcagtacattgatccggtagtgcttaccgcccgcaaccgcctgaccccgttcgcctgggacgagcaaatcatggccgacgcggggctgcactttcctgagttgtttgaacaggcccgcgagtttggcgtaacgcacggctataccttcgtgctgcacgattacaacgacaatcttgtcacgctttcctttgccttcaaccttgagcagagagtggaggccatccaggcactcaccgatcgtaaaggcgatatttcggtattgctggcctcaatccatgagtcgtacctggcgctgtccccactgtcagcaaaaaacgccgcagccctagagagaaacgcccgctttaccgacagggaaaacgagatcctctattgggccagcgtgggtaaaacctaccaggaaacggcgatgatcctcggtataaagaccggcaccatcaagtttcatatgtccaacgtcgtcaaaaaattgggggtcacgaatgcccgacatgccgtgcgcctggggatggagctgcggctgattaaaccggtggagtgatgggctagctagcctgtggaatactgaggcaacgactgcgcagaactcatcagccgggatacgtctaaatggagaaaatatcggttggcgaacagcgtctttcgattcgggaaatgacgggcgttaaatcggtattgagttggccgcgtggcgattaacgtaaaggcagcaataacgtatcggccccgaactctgcgatatgaaataatcacctagctgaacttataaaggtctagtaagggactgtactttagtctaactggtttctcaccccttgaggcgatacactttcccggtaatgttttgataaaaaatacaaaaaaaaacctgaccgcgtagggccaggttgccaatattggccaacaccagggaaaattttcttgcaccatcttaaagcgattaactccgcagaggcaagcgatctcagctggtttttaggcattaactagctattttgttatgtatgtacgctattttctggtgatttaagataacgtccatccaacgtgaataacctctatcttttgatagcctcgtttcgatttttatttcccgcctgatattcagcaatgaaaaaatattgttcctggaatgttacgcaacctcattctttattgtctgacacatgggtatgcaattatttgcagcattgtcattgccgctggggattattttatttttgataggggctgagtgagacagtggggatggggcgggttgcgtggcgtactcctgaacgtatctcgctagcgcggtgagcggttctggctagtgggtgtgagtgatgtacggcacatgaatcatcattgctctgtgcgacgaggctggaatcggatggtattgcgtgagtgtggcgcctgatcctggatgctcgttgcaacagcctgtggatgtagcatgttcatcaccaacgtggttgggaagggcgcgcagcggtaaggcggggcggacaaacgtgtgttgcggcggttttttcgacacttaactcattgaacaacggataagtgttgcgtgctggtcgcgggaaggtataattcacccgttttccgcatactacttcagtgccgaagtggcgaaatcggtagacgcagttgattcaaaatcaaccgtagagatacgtgccggttcgagtccggccttcggcaccattaagtaccgcgcgaacaagaagccaccgagaggtggtttttttgtgtctggaattcagtatctgcaaggcttccctcgccttttcactcaacctaagtcaattctgactcaatctgcatcaacttactggtgcggggacaactggaggcatatcccggttcgataatgtttgtaccaacgggggacataagcatggcgttaacagagatcaaagtctgtataaggccatagaaatgtctgaacgtcttgaagttgcagcctggcttcaacagcgtgccacagctattatgcgttatatagtgcagagcggactggttgattataatcctgcgcagaagaggataggggcagttgcttctggaaatagacaatgtcgtccggctttggagctaaagtacatccctgagttattaaagaaaataaatggttatactggtagaccacttaccgctgggctgcgtaactcactctacttatctttattcgttccagtgagctgcgcttggctcgctggtcagggatagattttgaaacgtcaatgtgggtgaccccttctgaacgagagcctatgtctggcgtgagacattctcaccgggatcaaaaattcgtacacctcatctggtgccgctttcataatgccttgaatgtacatatagttgcgagcatcatcgcaaacatatgctcatggattcttcaatgcaatgacctctgacaaaaccctaaagcaagcgatatcaaatattactatctggcgcaaaggcaaacagcgtgcgccacataagccattattgctgctgcacgtcctctcacactatcggcagggtcatgagcgtctgtttaactatagttctgaaatctacgagcctctgatggatcttctggaacgttatggaccgcagcgtcgtgaccagcgcccggacatgccattctggcgtctgaagggcgatggcttctgggaactacaaaacgcggaactgtgctcaaccaatggtagtcgccagccgccccgtcgtgaactcatcgaatataatgtcgcgggtggatttgatgccgatagttttgcgttggtggcaaaaaatcacaggttaattgatacgctggcgcagcagctcctggaggcgcatttcccggccagtattcaggaagacatcgctgatgagatggggtttgatattcgcacctctctccgtcaacgcgatccgaagttccgtcaaatggtgctacgtgcttacaattatcagtgcgcgatctgcggcttcaacatgcgccacgacaatgcgccaattgccctggaagctgctcatatcagatggaagcagaaccatggcccttgtgaagtacctaatggcctggcattgtgcgccatccatcataaagcgtttgatcgtggttcgattggtttggatgaaaatatgcgtgtgatggtttccggcgcggtaaatggtggcggggtggtgcagcggctgttctgggattttgcgggaaaggcgattacgttgccaccgattaaagaaaattatcctggcgagcggtttgtggaatggcataggaaagaggtgttcagaggtgagcattgatctgaggtagggcagttattttgcatgtggtatacaaaccattcagccttgatgatgactaaatggtttgtcggcagcgataattacgatgctttacgttctgcaagttcggagctactggcataagggacttttccagaaggtacaacctttgccgctgcgatcaaatgcacatcctgatcgtcaaagaaaatgtgtggcttaaacgcctttagaacttttgttttctctacaccgcccagaaaaaaagcctcatcgacataaactccccagcttctgagcgttttaatgacgcgcatttccgaagggctgtttctggccgtcactagtgcaatacggacgggagaatactcaacgcgggttggcagtcgttcctgaagcttagctattttttttaacagagtggcatatggcccttcttccataggaatatcctgctgtgcatcctccagagcgtgaaaagcggccattccttgagtcttataaaccagttcactttgatctgaaaaaaggactgcatcaccgtcaaaagcaatgcgcacttgcccctccgggatatcggaggcgtcggaaggcggatctttcaggattgcagcagcgcagaatcgggaatcaatcaccttttgcgcatcttcaacgttagttgttaaaaatagatccacatcaaatgcatcaaggtaatcggcaacggtttcgcctgccgtaaaggcagaacgcgtgatatcgagcctgtcatggcggatagtattcaaaacgcggatacccgtatcagggctgttacgcgacatcacaacaacctcaaccaacggcgatttatcatccggctggcggtaccggttcagacccagcaacgctttgactaaggggtagcctgttccgggctgtaaaggctggttttcgtgttccagcatgtaggcgcggtacttctcaatggcactatcaggatcggtcgcataggtttcccgaaacatacgatcggattcgctcatgtcgaaaagcgcagttgcgctgatgccaataactaaagtgttacttaaatctaaaggcatggttactttcctaaacaattatcgtgtaagggcagtatatatcctcagcagcaatgatgagcaggtttcttggatgcaaaccgggagaaaagggttacgctgttttactacgaaaaaatcaaccgtggtaatgacatgtgaattgtttgccatatccgtttaattaaagttaatcggctagccttaatgggatggctggttggtaattttttttcaatggtattatcaccaagagcaatacattcactgattttatcggcaagagcgatccacgaattctttcaataagttgataattaataagattactgagctctacgctcaattagtcatggatgctattgtataaacggttgagtacaaacactgttgccgctagtgtgaatccctacagtagatccagatgtatcatctaacgtaaactccaagggtacaggagaaagtacccctttttctttattcatttcaacaccaagattgaccttgcaattgaaagtttgtcactattctatttaagtatcatgctttatttccttcaatcttttgatataattgaacgttgaaaaaaacactttccgacataagatggcacatcttattaatgtacgcacaataaagccaagtgtttttaaaaggataaatttaactctatgtttttcagttatgagacgattctctacatttcctatttttgtcattacattggcaattttcccaccaataaagaaagacatggcaataaaccacatccatctataatggggggcatttttacttaaggataaacgagcttgttcttttaataaaacttggcggtatcttaataatgatgtagttacacactcattggcgacagcgaaacgatctgacatacctgttttatattttccctcttgaatggcattgcagtaagctgggggtggggtctggcaccatcgagaaggtgatggcaattgtgttattgttttggaaagagatttatttgggcataattttttattgaagtcttgaaattcctgtctgattttatccggagatacttgattgctatagtactcaggaattttatagaaggtgtcaagattttcaggtattacatattcaataatagatgattttgtactggcaatattctctagcgtttcttgaatgtacgatgcccactgacaagatgacatttcagaaagcccgttattgtcacacatgcggctgtagtctttcagctgaacaagaaggtatttggctgcatcattaatatccgtaattgtttcctcatatgctgttttaccgacagctacctctctgtctgatacccagaaaataccgttgccaactgctgttaagatgaggaaaatatctgtccactgtctgaatttctctcctgtagcaaaaatatcactaataattactgccaaaatccaaccacacaatagccctatgaggctaagacttgcgagtccagctgcgttacccgttgcacctgtacctcctatttcataggtcaatggcaaccactggatagcaggaagaaggtgacaaagcgataataggccaggggttataagaagaacaaaacaaatgatgagtcccttttttctggcaagtatccatgagctcaagaaaacaaagggtaataataaaataaatagctcaagaaaacatcctcctaagactacagcaactttattgggagaccagtaactgctcaaaagagcaccctgtgcgttcatttctacaaagttggtactaatcactcccatcccatccagtgtttgcaataaagcgtatccagcgctgtagcaaagcattatgtagggataaaagaataggatcataatttactctcttttcttgcttttcccattatttttatagcatattcaatttgttgtttaatatagctaaaatcgaacattgtcaatttttcgtcctatttagaaccaataacaactaaatctgccatcgttgttttcttgataaataaggccgtactgccaagtagcttaaggccttcttcattaattttgcttactctaagtcctggttgaacaataacaacttggaatttaagaggtgtgattctggagcgctctttcatagcagcaaggtcttttatagtgcctttcagaaagcgagaatgaccacgcgatcgccactgttcctcgcgacgcttaatgtgatggtataaataggaaagattcaggtgtttccaacgaatgcatctctgtgcctgcccacatacttcgtaaagatctttaagtcttgctccagcttcttctgagcctgaatacttgcaatggattaaagagagaacaatacagtcatcaactattctcaaccccactaaatctgctgactcacctttaccatcatcattaataatgacatcgtaattatctttaatttcactgtaccaacgccattggatggataatggattacgagtatagcccattgattccactcgaacatcagttcccttccaatcaaatgctacaatttcgtctttgtcataaaggccaatattttgacttacatggactatatgagcgttgtatgaaaatgagccatcggagtaatgaatcattactggatcaatttccatatactctgatagtgataccggttcagattcaccacgctgtataaaaacttcagggccagatatcaattgataggaataaccttttgctgtagcacttcccgtgagacataatttatattcagatgacgtttcatctgtagaaaaaatgagccgcacattaccatcttcaaactttccagcagtcctaacctctactaaatataaatgagcagatatagtatcaaaatgaaaaataactttatcttcaaacgcagtaagcaaatactcaccccattgagctgatattggatattcattatagggttcaagtaatgggacaggacgcaaaaagttacgcgtaagattgtttggatccggttcagaactaaagatcttgtcccaggctttcttaacccagttgcaccaatcagcaatgctgccacctttttgtggtgaccagactttacctctgcgttgcgagcatccccagattacacggtttcctgattcataacctaatgcagcaatattgcttaagcttgattgagatgcttcaattagtgatagcccctcagtgacatttgggccaaaatattgagtaaagctgattgccccaatttgagatgcgcctaaatttcttgccaaaggatattcaataccattaaatacattaaagactttttcaccactgacaacttcaaatttatcatcacaaatagtactgactagattctcaactcgaaatactttatagtcatttgagaatacaaacaaggcggatctgtcttgatcccaatgagcaattagaattttataattggtatctttaagatctttgtagtttccccaccggactgaagttgcctggacagctagcacaacaagcaaattctcatcttcagctattgcatgccaggattcatcgaatctgggcagtttctccttgtatctttcaggctcccaattgtcacagtacgttttaaataacatgacagaacaacttggctcaatattccagagagaaatctgatcgtgtaaatcacctttcctttttaaggcatccacgacctcttgcaacctaatctctctagcaattcgtccttcagagagtcgccttaatacgttatcccaatcggcatctgttgaatatagatgctgtaattcaccttcaacattagggtccgcaacattcatgactacactggcttgaccaattttctgtgctttattgacacgagtaaatcggccaatgaactgcaaagttactgcaagagacttatgatgatcatgcaaagcggcaattttcaggttgggtagatcatagccttctcccaacatgtctacgcaaataacgattcttgattgtcttgataataatttattaagacgtttttttatttccgttttaggataatcagaatgaacaacgattggattaaagttcggtgcaattttctgataaatagtaagtatttcttctgctcgctgcttactgctagtacgagccatgagcaaatgatcaaggtcattatttaagtctatacgcagttgacctacagctgtatccgcgattgcatgatccataaggtcagagtaatactcctctacaggcagcaaatttacatttgtaaaatagcctgctcgttgggcttcccccattgtatagttatagataatttttccaccaagggactttttatcattcctaaagggagtagctgtaaactgcactacacgtttgtctgtgaatcgttcgcgaattgtctgccatgatgaggctgagatatgatgggcctcatcaacaaaaagatggctacacgactcgcaaagtgcatttaatgctgcttcggagcaggcagacaaaacgctggtcgtagcaaccaagacgtttgattcacaagctaattgcttagcttcttccgctacctgaattcccttcttaataatagcgacattagggagtgtaatgtttggcggaacgactgttagctctggcaaatatcccaactcaatgaattttttggatatttgtgttcggagagagtcagacgggactatgagcaaaattcgctcgcatcgctggtatatcatggtagccagcattgtttccgtttttcccgttccagtgggcagtacgacggtagcaggttctacctgcaaatcagtagcgaaatagcctgcaattgcatgaagtgcacccagttggggttttctgagacctggagaacggtgctctggatcatcctctctaaactgaaattgatgataccattgttcattaatatcctcaggtgaagtgctaaatacctgctctggaaattgctcccagcttaactcagtatcttctcgccatttttcgaatgtaaatggttccttagctttaagggaagctacaccatctgcgcatttccccctggaatttggatctttcagatagatatagtctagagggggctttagacccgtcacaagttcaaaatatccttggaaacgtgcatttctgacttgagccgatactgttgttgatcggcaaagtaatttatgaacataattcccccccacttttcttacaggggcagctttcgcgggcaaggtaaatttaattgttaacaggtcaaataagtccatatgtacttacctcttaagatgtcctgaaaaagcctgctgacttaatttagagaagagggcgtcgctatcaatatcgcctgacgccattttatttaagctattattgattattgatacaatcgaatgaaaattaaccataagttcgtcgggcggaattagaatttcaaaatttttaagttcaacaggagatatatgtggcaccgttgtttctgtcgggtagcaatgcttttcgaaagctggcgatttaatacaactgtaaatatagtttgtgtaagattcgcaacgaggtcgtaacctagctacacgctgaactaagtacgtttctcgctgattttcagggaatatgcatacttttaacccgcttgatatccacggacggtccatagcaaggataatatcactcgccttaattaaataattatctagtttttctagtttattttttggccagaattttgtatcagcccaatctaaataccccgtaagtgtatttgcccctctgcaaagccgtactgattctggtgcatcactaatgtactcattacttttgaatgcaaatccggtaatgacctctgccaattcagtaatgggagctttttttagattttttggattttcaacaggatcgccaaacatattcaaaaacgtagtacgccaaaaatcgttagccagtttcatggcttgctcgcgtttttgacgtataccttcggctttatcaagaatagctgcaatacgtttttgttcattaatagggggaattggtacatttaagcccttaagaaaaggaagtgtaattcctttaactgttgctcctttcccttcactctctattaaactactttgagattccaaccatcgaaaaagatagtctctatcaacaatgtcgttgtctttaataaacaaggctttcaaatcttgatttattgctaaatcaatagtattaattgcaaccttacccaatgccatgcgtgtaggaactattatatttcctgctggaataacgctagttgccgaatttctcacccctaaaagggtgattgaatcaagcgtagagtcaagaatattttttttgaaatccttgactgaagcccatggaatatcaccattccaatattcagaattatttttatcaggggtaccaccacctttaatatcaacaagttcccctaaggaaatcataggccagctcacaacatcccctccagctcatccaaatccgccagaatctctttttccagctcctttaaccgcttcaatatcaccttaggatcttcatactcctccgcctgatacaccacctctttatagcggtttatagagaggtcgtatttctgcgctgcaatatcctctttcggtactacaaacgccgcctgagtgcgatctttaaaatcaacaccagcatcaatccctttcgggtgctgctgttttagcaatgaggctaatttctcacccataaagttatcaacgggtagcccgcgtaaagtacggtaatgcttccagcttgcaagcagatgcggcagatcgttctcttttatcgggttacgcttgtcatccaggctgtagccatcattttgcaggtcatagaaccagacctcgtccgtctgaccgcctttggtaaagatcaggatcgctgttgccacaccagcgtaaggcttaaatacgccggaaggcaggttgatcaccgcttccagttggttatcttcaaccagcgttttacgcagcgactggtgcgctttactggagccaaacagcacgccctgcggtacgatagtggcgctgcgtccacctactttcagcatttgcaggatccgcgcaaggaacagcagttcggtttttttggttttcaccattgccgacagcgtggagtcgatatcttcctcgtccagtgagccggtaaacggcgggttcgccagaatcaggttgaaagcgtttttactggcctgcgggaaattggtgctgaagctttggctcatggtgtcctgataatgaatatccggctcttccacgccgtgcataatcaggttcatggcggcaatacgcagcatggtggtatcaaagtcgtagccgtggaacatgttgttatccacatggtcacgccacggcgtcagcagatcaccagtaaagattttttgctcttccagctcaccgcgttcgttggtgccaatctcggtatgaatagattccagcgagctgtatttttccagcaggtactcatagctggttgccagaaaaccaccggtgccgcaggccggatcgcaaatcgtctcaccacgcgccgggttaggttccatcatctcaaccatcgtgcggataatgtggcgcggtgtgcgaaactgaccgttgatcccggcggtggtcagcttacttaacaggtattcataaagatcgcctttggtgtcgccacgatccagcggcaggtttttgatcacctccacggctttggtcagcagtgacggtttcacaatctccagacgggcatctttcataaagttgcccagcagcgtcaccttcgacgcatcggcctggccgagctgacgaaaatgctggaatacgccgtcgcgcactacttccatcatttcatccgaaccgaggttactgtagtgactgaaacggaactcctgctgttcaggcgcaaaacgcggtttaaaatcaacgcccgcgatttgcttacgcttctcgtcgcgttgttcctgggtatccagcatccgggagtacatcaggtaggtgatctgttcgattacagtcagcgggttagtgatgccgcccacccagaaatcttcccacaggccgtcgattttactttttaagtcaccggtgatcattgttacgtataccctgttataaatacaaaagccccgctgccggggcttgtcatgtgcgtattataccgtcgctgcgtcggtcacaacacccagctcttcgactatcttttgcaaccggacgatctgctctatatccgggaacacaccggtaacgccttcgttgtggatatgcgtaaacggttgttcaaagagctgccgcatttcaatggtgccgtaatcgcggatgtggtttttcagcagtgacaggaagcgcagttgctggctggtcaggctgttgtcagcggcgaactgggcaaagcgcacttccactgcgtcgctgtccatcccgatgatggtacgcaaaagtttatccaggctagctgttgcctgcggatagaactctttcagtgcccggatatcaacgttcggattctggatcagcaccagcttcgccagttcatccagctcggcttgcgtgaccggctcgccgttgcggattttcttcagcaccgggttttgctggaacagcggctccagcgctccctgaacctgctggcgatagagtttgaaatcaatcgagcggatattggttttacgggtttccgtctggatcaggttcgcatcttcggtaatatccacctgtatcgaaccaaatttcggcgtagcatctttctccatcaggtgcatgatgccgcgcaggtgaatgcggatatcttccagttcttccagactggcctgcttccaccagcctaaatcacgaagctgattaatccgctgtccctgctgttgcacctgcgccagatgcggcggcagacgttccactttctcgacgatgaccggccagagcacatccagctcttccgggttggtataacgggcagtttgcgccgccagaatatccatatcgaagcgcatagcatcgctttgcccacgcacgtccagccactgcatcagcggggccaggacagatagcagatcctgctgtgttttaggggaaagctgacgcagcactttttcatcgctgtactgtgctttttgctgccacttttcctgcacagcaatcgacttttcatccagcgcgttgatctgctcgcggagctggtgagcgactaaatccaccgcctgtttatcgaacttacgctgcgcagcagcccccagcataacccacgcttcgaagcgtttttgcgccagcgattttgtcgctgtgacttcggcctcttcggtatgcagctcgtgatactcgaagttgccccagtgatcgaagatgcgaaatttctgtttatccagcggcttgccgttttcatcgttgccgtacagccctgagcaaagacgcgtaccacggccaatcatctgccagaacttcacttttgatttgaccggcttggcaaagaccagattcacaatttccggaacatcaataccggtatcaagcatgtcaacagagatagcgatggtcagctctttgttggtgctctcatccagccctttaaaatcgtcaatcagttgctcggcgcggggatcgtagttgtcgatgacctggcagaagcgtccggcaaactgcgggtacatgtcgttgaacaattcattcaacagcagcgcgtgtttgtggttacgggcaaaaatgatggttttacctggcaactggccgtcccgatctttcaagccattttccatcaggttacgcaggatatagcggttggtgtctttgttgtagatcgcctcatccagcgccttgccatcaaattccagcgtatttggatcgataccctgttcttccagctcgcggatttgttcgtcgcttaatttctcccgtttgatgccttcgcgcaggaattctgtggtgtgcgtgacaacctcatagggaactaagttgttatcggcgatggcatcttccaggctgtagttggcggtagggatacgtccttcacaaccaaatagcccaaaagtggttttgctcaccatatcgatcggcgtggctgtcagaccaatctggagggcatcaaaatacttaaacagatcgccgtagacgttgtagatagagcgatgggattcatcggcgatgatcagatcgaaataaccgacatcgaaatggtccatgattttcatcatgccgggataggtggcgatgtagatcctggcattctgcctgtctgctttcttcgatttcccgaccacatacagcggctcattggtgaactgattgaaggcattcgccgcctgtttacgtagctctttgcggtcacaaagaaacaggacacgttttacccagcgggcatcaatcattagtttgcttagcgcaattgccacgcgggttttgcctgtacctgtcgcctgaacaattaacgattgtcggtacttgttggtaaaccgttcgctgacgcgggcgatggtttcaagctgatacaaacgtccggcaacggccttaccttcgttatccttaacgtgcggcacactgttcagcggcagacgagtttcacgctgctgaataaggtattgcaggctttccttgctgtagaagccaaatacccgacgcggaggataaccatgagttttatggtcgtcccacagccagatatcataaccgttggtgtagaagatgaccgggcgctgaccatattctttttccagccagtcggcatacagtcgggcctgaattcgcccctgctcggcattgacgctggtttttttggcttccaccaccgccagcggtttatgcgcctcatcccacaagacataatccgcataaccgccaccggttgcggtaggctgttctttaacagggtgttcctgcgtaacctgatcggtattttttagctcttcccctacattccagtcagcagcaagcaagcgggagtcaatcaggcggcggcgggtttccgcttcatcaatagagaggatatcggcaacatgctggttacgcgctctggcttcattcaggcgctgggtgagctgttcggccttttcctgctcctgttgtaatgcgcgttgaagcgccagttcacgatcgcggctttcgatttgcgcctgtattgcttcttccaagtgttttttatcggaactcgcagaagatggcgtcagaggaggaagagtaaatttggggcagtcatcaacattaccgtgggcgtagcgaacatacagccaaattcccagtaaatacgcttcctttaacagccagtaagtatctttagctttgatacgtccgccgtgcgcggcgcggttaccgtggatacgcagtgcatccattttcatgatgatggcttccggcatcatgctggtgaagacatcggcgttcattaaatcatacagatttgctttgatgccttcaggcagccgttcctgacgatataaccaacgcaccatcaattcggtgtagttgcgcagcttcaccaaacagctttccggatcggagtgaacatagcgttctgccatatacgcgagttccgccagttccggccactggctgcgcaacatttcaaaattgagagactgctccatcaatcatcgccttatatcgtggatacaacagcatttctggaaaggatatcacattacttttggcagcaaagcgagagggagtcatagctgattcatcctaagataaatcgatgactgctgatcattttattagtctccaaagcaattctttatttgagattggacgcacttattactgatcaaaataatcactatccaactttggcactttaagcaacgttgaactaacacccacctcgttatccatcatcagatgcaccaatcggttaccgtcgataagtaccatgccttctaccgattgcgcgtaggcaacggcatgcttggtaaagccagatgtcgtgatgaatacccctcgtttggccttttgtcccacaagtgcaccgtagaaggcatgtaactcagggcggcctacggtgttttgccagcgtttggcttgcacatacactttttctaagccgagcttgtctaaagaaattacgccatcaatccccgcatcaccgctgcctccgacacgctttaaatcatcgcggtggccgccgtaacctaaacggtgtagcacatccaacacgataacttcgaagcggcctggggatacctggccaaggttctccaggagttccgttgcaaccgcattgcggatctctttgattgattgttccaggcgatcgtctgggctgtttgttaacatcgcttcggtgagaagaggttctgtaaccgggtccaaatccaccgcatcactattttgttgaagtttgacgttggtataagccaaagcgagatgctcgacttctgctgcagtgagcgggtttggatgctgctttaaccaatcgatgcctttggcggttaagcaccatttgcctctggataagctgtgcgagagcccggcacgtttcagacgatcgtgagcccagccggtacggttcttgtaaaccaattggccgctggcaatggtctctgcccgttgttcttcgtttaggttaagtatgtctgctgctgcatcttgcacatcccgagcaactgcgccttcgggcctagttgctaaaaagcgaagcactggctcgatgaattggtcgtaggtaggtactgacatgctgaggttccctgtttttccttattattcctatgatactgcacaaactcggttttgaagttgacaggtagcacgctgttgcaggcaacttttaaccgatagcggcctctttcaactccaacttcaccatcagcttcttgttcacctctttcccatctaccccgctatgaatccgccgatggcaagttgggcagatagcgcccacccactgcgggtgatcggggccttcgtcggctaggcgtttagtgtgatggggttcaaggtagggctcgccgttccttttcttgaatggtgccggctgatcgcaggcttcgcagatgccattggcgcgcttgagcacgtatttttttacgtcttcgctgcgtttgaaccaggattttttgctgtcgctctgttggcgctggcctgatatctctgaagactttatagcctttgcgcgcaactgttctaaactcacctccttctggcctacttctgatgagataatctcatgatcagaatcttgagcagaagatacacggaatagattgaaaattatcccttgtctcatgttttcttgggtatctttacattcagcgtagttccatgaatcacactcaaataacccagcaaatttcacgcccgtacgttttttgttatattcaaataaaagtatatccttaccattctctttatggtcgcggatatctttattgcctttggtaaactgcatgttacctttctggccttctcccgtgtaggagaagtggtcgttgttagaccatccatctttgtacccatgagtttcgccagtctcgccggtgaaaatgaagatcacggggaattctttaggtgtcgatattccgccctgttcttgccctccatagaggtcgtggaggtatttacgtttataaacttcgtctttttccagtatctcaaaaggatgcggtgtttcgacgatcttaaaaccgaggtccttgagaaattgaatggctttttccgtgccgctatcggcattgattcctttaaacggatagccatgctgctcacggtatgctctagcggcaatgcctcggatgtcgtacttctcgccattataatgaagggtgtattttttaaatcgttttatttcatgttgttttaagaattcatctcggccaagttttttatattcttcgatggcttttaaaacggattcttttgaagataacgcctctattgcagttgccaaaactactccctcaccttgccgagttgactctgagcaatgtgcttgctgacgagagcagtatgcatcaatacccagcagttaactcatcgatttaccgaatgcgttaactatgccaggtagggaaggaaatgcctaccttgatgaatgcttttgttgtgatatgtcagtcatatctattggaaaagcgtgattgggaagggcgacgagtacaggcatcgccctgattgccatttacgttagccgcaggcttccatctcccgcagcgcacgcccataaaggttacacaacgcaggaaccagatgcgccgtggcgttgaggtagcgattcatctgctcccagccttcggcatccagctgcgggtgcttttgcagtaaatggccgaacagcatcaggccgtggcacagaccttccgcctgctcggcagagagggcggccaggtctaagagttctgagggattgaaagcgctaagatcgaggtgattaaacagttggcgatagagggtgagagtgtttgcaacggattctgtagtgggaacctttgtcatgggtgcatctccgtatgtcattagttaatgactatcaccagagacgctaaactcgggtggtagcccagacggggttagcgtcaccgggacatacgaaccggcgcttcttgcgaagcccccgcctgagccaccattatttggagtgaactaaagctgctgcattattacataatacagcggtagtatgtcagattcggaacgctaactccggctgcggattttgtcacagcgaaaaaactatagcgttatcagtaaaaggaaaaaataatctgtatagaattacagtttatttacttttaggattggaatgtacctcgcaattcggcatatcatattttcgttgaactatcagtcatccattcatggataatatttcttcattaagatttataaataatggaatatgatgaaagctaattgcgtactggtcattgcaggagcgatattgttaagcgcctgcaccggcgatcgtctcgatcagcgctatgcgccggatatccctatcaccgcccatactaaagcgaatggcgacatctgcatctctccgtcaccaaaggaaaacgaaaggccagatacgctctatctcagtggtgatgctgatgagaaattgattgaggtggggaatcaggatcttaaaaagggcatttgcgttacgcaaaacgattacccgtttcgggaaaatcatatctacagcatgaggctaaattttgtgtcgattgagaagcgcagaaacctgcaggatatttccggcagggcctttattgctcacttcaaagtgaaaaagctcaacggcgcttacgaaattgaaaatatcacgcagggcagcagataacgcagagacaaaatgaaacggatcttcctcctcgcattccccttcctgctcgccggctgtccgtcgataggcgatcgtatccccgtagactaccccgctaccgccaacctgcgtgagggcaaagtatgcatcaccgttcagccgcagggagacgaaaagctcgtgggcatctcaatttaccgattggatgaggcgcagagtcgtacattcaaattcttcgatccactgcgggatgtcgcccccaatcagtgtgtccctgatgagggctacgtatttacgccggggcagcaataccatttctccgcgaagctggtctccctcaagaaacagcagtcgggtgagtttccctctgcgcgtgaattcgtcgccgaattcgttgtgcagcaggaaggcaatcaacttaggttggaagccctccgcatcccacgctaaccccaccgccccaaacctaccccaaatcccccccattgctggcgatcacctttttataccaccagaacgatttcttgcgggtgcgggcgagggtgccgttgccctggtcgtcgcggtcgacgtagacaaagccgtagcgcttgctcatttcgccggtcgaggcggccaccaggtcgatgcagccccaggtggtgtaacccagcaccggcacgccgtcggcgatggcgtcggccatggcgcggatgtgctcgcgcaggtagctgatgcggtagtcgtcctcaatctcgcctgctgcattgaactcgtcgtgcgcgcccaggccgttttccaccaggaacagcggtttttggtagcggtcgtacatcatgttcatggtgatgcgcaaccccagcggatcgatgccccagccccagtcgctgcgcggcaggtgcgggttcgccagcgatttcaccacgttggcggcgctgctgttgttgtcgttcatgtcggcggaggcgcagcgcgaggcgtagtagctgaaggagacgaagtcgacggtgtgcttcaggatgtcggcgtcttccggttccatgacgatgctgacgtctttctcacggaatacgcgggcggcgtaggaggggtaagcgccgcgcgcctgcacgtcgataaagaacaggttctcgcggtctttctccagcgcggcccacacgtcttccggcttgctggaccacgggtagaagttgccgccggccagcatgcagcccacctggttggcggggttcacttcgtgggcgatgcgcgtcgccagcgcgctggccaccagttcgtggtgcgcggcctggtatttcacctgttcgggattttcgcccgcttcaaacaccagcccggcgccggagaacgggctgtgcagcaggatgttgatctcgttgaaagtcagccagtatttcaccagcccgtcgaaggtttcgaagcaggtgcgggcgtagcgggtaaaaaactccaccatcttgcggttgcgccaggagccgtattcggtcaccaggtgcatcggcacgtcgaaatggcacagggtcaccagcggttcgatgccgtattggcggcactcttcgaacaggctgcggtagaaggcgatgccttcggcgttgggcgtcagctcgtcgccgttggggtagatgcggctccaggcgatggaggtgcggaacacggtaaagcccatctccgccatcagcgcgatgtcgtcgcggtagcggtggtagaaatcgatggcgtcatggctgggataaaattcgtcgtcgcgcaggctaaagcgcttctccagcccgagtttgaccgccatgcggttggcgccgtgcgggagcatatcgacggtggtcagccctttgccgccctcgcgatagccgccttccgcctggttggcggctaaagcgccgccccataaaaatcctttagggaatgttgaatcggacatgcaatcctctggtgtctcaatgcgttgcgccggcggcgttcgccgccggtgcggtttggccgggcgcagtggcgttttccggcagatcctcgaagcccagcatcagcgtgagcgcgaacgacagcaccaccgagagcgccatcaccgccaccacccacacgatgctcattgggttggccggatcgaagaactgcacgctggtgaacagtccgggcgaggccatcgaatggctggccaacccgccgatgccggcgactgcgccgcagacgaagccgctgatcaggctggcgatcagcggccgcttcaggcgcaccgccacgccgtacagcgccggttcggaaatccccgccacgatggcggaggccgcggcggccagcgcggtctggcgcagttcgcggttcttggttttcagcgccaccgccagcgaagcgccgcccagcgacaggttggcgccgatctccgaaggcatcaccatgccctctttgccggtttcggcgatggtctggatgatggtcggggtgaatacccggtgcatgccggtgatcaccagcagcggccaaatcgcccccataatggccacggagagccagcccaggtagccgtgcacggtgtagaccagcgcagagatgccgctgccgatccagatgccgagcggcccgataagcagaatggcgatcggcgcggcgatcagcacgatcagcatcggcttgaggaagttcttggtcaccgccggggtgatgcgatccactccgcgttcgatgtgcgacaggatccaggtcatcaccagcgccgggatcaccgtgtaggtgtatttcaccgccgtcaccgggatgaaggcgaattccaccgcctggccctgcgctgccttggccatcagatcgataaagttgggatgcaccagcaccccggcgatggcgatcgccaatgacatgttggttttgaacttcagcgccgccgaggcggcgaccatcaccggcaggaagaagaacgcgccgtcgccgatcacgttgaggatgacgagggtcgaggagcctttctcgaataccccggccatatccaggatcatcgccagcagcttcaccatcgagccgccgatgatggcggggatcaggggcgacatggtgcccaccagcgcgtcgagaatgccggcgccgatacccttcagggtgagcttgcgcttcaccggagcggcgggggatgctgcgcccggcatgccgagcgccagcaccgcctgataggctttggccacctcgttgccgatgatcacctggcactgctcgccgctgtgcaccacgcccagcacgccgtcgatggccttcagcgccggcgtgtcgatctgcgctttgtctttcaccacgaatctcaggcgggtcatgcagtgggtcacggcctcgatattgcccgcgccgcccagggcggccacgatggcgtgcgagatctctgcgtagttcttcggcatggcgtgtcgtctctcagatagcaattcggatagcccaaaggcgaatatttactgcctgggcgatccgtcgttccatccgtatgaaacgcccataagaaaccggtttcacaaaatcatgtattggtgttttgtggttggcaagaactatggtttttggcgttgcgttttcgtgatctggatcgttaggggtaagcgcataccgatgtgcaggggcgtgaaaacgttccaaacgccgggcgtcttgggtagactgcgctgaacccatggattttggcggcgcacagatggcaacgatactcgaggtggcgaaaaaggccggcgtttcaaaggcgacggtgtcgcgcgttttgtccggcagcggctatgtcagcgaggagaaacgcgcgttggtggataaagccatcgcggaaaccggctatcggcccaacctgctggcgcgcagcctggcgaccaacaccacccaaaccctcggcctggtggtcaccaacaccctctacagcggcaactatttcagcgaactgatggcgcagtcggcgcgcatcatggaggcgaacggccgccaactgatcctggcggacggcaagcacaccgccgaagaggagcgggccgccattcagtttttgctggatctgcgctgcgacggggtgatcatctacccgcgttttctgtcgatcgcggaaatggacgagattgtctcccaacaccgtcagccgattctggtgatcaaccggcggctgcggctgaacgacagctactgtatcttcagcgatcagcacgccgccggcgcggcggcggtggcgcacctgatcgcgcgcgggcatcgcgatatcgcctttatcaccggctcgctcgattcccccaccgggctggagcggctttccggctacaaatccgcgctggcgcagcagggcattgcggttaacgaggcgttgatcgtcgaaggaaaatggaacgcgcaaagcggcgtggcggcggtcgatgcgctgctggccggcgggcagccggtcagcgccatcggcgccggcaacgacgaaatggccatcggcgcgatgaagcggctggcggagcgtggcgtggcggtgccggaggcagtatcggtcatcggcttcgacgacatcccattggcgccttatactgtgccgtcgctgtcgagcatgaagatgccggtcaccgagatgatccaggagaccatcaaccgcctgctgtcgatgctggacggcggcgagctcagcaagcgccccagcttcccggccagcctgatcgagcgcgagtcggtggcggcggggccgtacgagcgggattgaacccggaaatgcgtccggggggttaaggtccaggctggctgcctaagccctcgtcactcggcgcagcgatgtcatcctgccaccatgcttttccgcggcggcgtttcagccgtttccccttaccaccctgagtaataatctgaaagagcgccccaagactgctctttcgagccgctatacgttatgttatcccccgaaagtttggccgttcccacccgcctttagcggttgaaagcatcgcgctttcttctgtctcggcatggcttcctgcgttgcgtcggtgaacggtttcactggccagccttgcggccctgcggatgaatggcctgagcatgtcgccgtccggcggcaatacccgagcgaccaccagagattggcgtctgtgagccaagggcggtagcgtagccatccggcgacaatatccgaacacgacggttgcgtgccgacctaaaaccaacagagctgcgatgcagctctgttggttttaggggcttgctcgcggcggcgtggtgggaatgttgttattcgattaccggcagggtgtttacccaggaaaaagcctttagccgttttatgcgcatgtaaaacaatgtggcgatgaaatgaccacggcgtattttagaggattctatgaaaattatcgttaccggcggtgccgggtttattggctcggccgttgcccgccatattatcaatgataccgctgatcacattttggtgctggatagcctgacctatgccggtaacctcgaatccctggcgccgatcgccgatagcgatcgttactccttcgagcaggtcgatatttgcgaccgtcaggcgttggatcgcgtgttcgccgcctttcagcccgatgcggtgatgcacctggccgccgaaagtcacgtcgatcgttctattgacggccctgccgcctttatcgaaaccaacatcgtcggcacctacaccttactggaggcggctcgccagtattggcacgccttggacgccgagcgcaagcaggcgttccgtttccatcacatctccaccgacgaggtgtacggcgatctgcacggcaccgacgatctgtttaccgaaactacgccttatgcgccaagcagcccgtattccgcctccaaagcggccagcgatcacctggtgcgcgcctggttgcgcacctacggtttaccgaccgttgtcaccaattgttcgaacaactatggcccttaccatttcccggaaaagctgatcccgctgacgatcctgaacgcgctggaaggcaagccgctgccggtatacggcaacggcgcgcaggtgcgcgactggttatatgtagaagatcatgcgcgggcgctgtataaggtggtcaccgaaggcgcggtgggggaaacctataatatcggtggtcacaacgagcgcaaaaatattgaagtggtgcaaaccatttgcgcactgctggatgagctggtgccgcacaaaccgggtgatatcgcgcattatgcggatctcatcacctttgtgaccgatcgcccgggccacgatatgcgctatgcgatcgacgccgccaagatcgatgcggagttggggtggaagccgcaagagacctttgaaagcggcattcgcaaaaccgtggaatggtatctggcgaacgaagcctggtggagccgggtgaaagacggctcctatgccggcgagcgtctgggtttgacccgttaatcgatttttaaggaagaagaatgaaaggcattgttttagcgggcggttccggcacgcgtctctatcccatcacgcgcggcgtttccaagcagttgctgccgatttacgataagccgatggtctattacccgatctcggtgctgatgctggcgggcattcgggatatcctgatcatctccactccggaagatatgccctccttcaagcgcttgctgggtgacggcagccgtttcggcatcaatctgagttatgaaattcagccgagcccggacggcctggcgcaggccttcctcattggcgaagcgttcatcggcggtgacagctgcgcactggtgcttggcgacaacattcacttcggccagggcttcggcaacaagctggagtcggtggtgaagcgcagcgaaggggcgacggttttcggctatcaggtgatggaccctgaacgtttcggcgtggtggagttcgacgataacttccgcgcgttgtcgctggaagaaaaaccggccgtgccgaaatccaactgggcggtcaccgggctttatttctatgaccatcacgtggttgagatggccaagcaggtgaagccgtcggcgcgcggtgagctggaaatcaccacgctcaaccagatgtatctggaacgcggcacgctgaacgtcgagctgctggggcgcggtttcgcctggctggacaccggcacgcacgacagtttgatcgaggcctctcagtttatacacactattgagaagcgtcagggcttcaaggtcgcttgtctggaagagatcgcctaccgaaaaggctggttgacgcgtgagcaactggccaccgaagccaagctgctcggcaaaacgctgtatggccagtatctgtcgcagctgatcgcggaaaaataaccccggcccgccgtgctttgaacacccggagcgtggcggggcactggacgaacctgcatatagagcggatatgagcactgtacatatttgtcctctggataaatttattccttcattcattgaatttgtgaatgagaaattcgatcccgatgaacacacgttttgggtctatggcgataaggtgcgtttcgctttgccgccggcggataacgttcactatctcggggcggatctgtttggtaacgtcaagccgacgttgaagttgatgaaggccattcaacgtcacgatcgggtgattctgcacagcttccacggcatcaagatggcgctgttgctgctgttgaccccttgggtattaaaaaaatgctattggttcatatggggtggtgacctttaccaataccaaatcggcaagcgtaacttcaaatggcgcctgacagagcttctccgccgcccggccattaagcgtatgggcaactttgtcacttacatcaagggcgattacgagttggctaaaaagtggtacggctgcaccggccggtggcatgagtgcctgctgtataccagcaacgtatacaagaaaaacgtcattgatgaacgtgcggcgggcgaggacggtaaaaccaccattctgctgggtaattctgccgatccaactaataatcatttttccgcgtttgatatattggaaacgtacaaaaacgagaatattgagctcgtcgtaccgctttcctatggcaataaacgctatgcggcagaagtggtggccgaaggcacgcggcgctttggcgagaaatttgtaccattaaccgactttatgcctttccaacactacctgacgctgctggggaaagtggatatcgcggtgttcaaccatcatcgccaacaggcgatgggtaacaccatttccctgctggggctgaaaaaaacggtgtttttgaatccaggcaccacgcagtgggacttctttcaagaaaaggatatccaggtattggatgttcaaacgttttcgctacgcagcctgagcgcggcggaaaagcatgacaacgagcaaaaaatcgaagcctatttctccgctgagaaccttaccgcgcagttaaaggccgtctttacttcctgatgccgcacggcacatcgccccggcatgcattcagaatcgacaacaagggataacatgataccgttcaacaaaccaccggtaaccggcaacgaaattcaatatatcaatgcggcgttggagaatgggaaattgtcgggcgacggcccgttcggcaaacagtgccagaaatggtttgaaagcaagctggggtgcaaacacgcgctgttgaccccatcttgcaccgccgcgctggagatcgccgcgctgctggtcgatatccagccgggcgacgaagttatcatgccaagctacaccttcgtcagtaccgccaatgccttcgtgttgcgcggcgcgaaaatcaaattcgtcgatatccaccctgaaaccatgaatatggatgcagcgctggtggctgcggcgatcaccgataaaaccaaagccattgtgcccgtgcattacgccggcgtctcctgcgatatggatgcgatcatgcgcctggccgaccagcataacctgctggtggttgaagacgccgcgcagggcgtcatgagcaaatacaaaggcgatttcgttggcgttaaaggtcacctggcggctttcagcttccatgaaaccaaaaactacaccagcggtggtgaaggcggcgcgttggtgatcaatgacgaacgctttatcaaacgcgccgaaattctgcgtgagaagggtaccgaccgcagccagttcctgcgcggccaggtggacaaatatacctgggtcgatttcggcagcagcttcctgccgggtgaactgcagtcggcttgcctgtgggggcagttggaactggctgatgagattaacgataaccgactggcgacctggcacaagtactatgcgagctttgcgccgctggcggagaaagggctgctgacgttgccgaccatcccggcggactgcgagcataatgcgcatatgttctatgtgaagctgaaggatatcgagcaaagaacgcagttcatcgctcacctgaaggcctgtggcgtgatggcggtattccattatattccgctgcactcggcgccggcgggcaaggtcttcggcaccttcattggcgaagacaactacaccacccgcgaaagcgagagactggttcgcctgccgctgtactacaaaatgaccgatgccgatcagaataaagttattgaaagcgtagtgaggttctttgagtgaacgcccgcaagatcctggcgttcgccatcgggccgatcggtaatgccgcgctggggttgttgaccctgccggtcattacctggctgttttcggcagacgacgtaggccgaatcagcatgctgaatgtggccgtgtctttctgcgtgctgtttttcagtttggggcttgatcaggcttacgttcgggaataccacggtgaaaccgatcgcgggcagctgttgaagaacgtcgctttccccggcttgctgatgatcgtagtcatcagtgcggcgttcctgctgttccccggcagtttgtccgcgttgctgttcgaacagaaagacacggcgataagctggcttatcatgttgattcttttggcgtcgttcatcaaccgtttcttgtccctgatactcaggatgcaggagaaggggatggcgttttcgctcagccaactgatgcccaagctgatgacgctgatcgtcattggcctgtgctatgttctgtttacccagcatacgctgatgcagttggtggtggcgaacgccgtcggttttatcgccgtgtcgctgatgctgatgtggtcttcccgggcggattggatagccgcactgcgcagttcgctggactacggcaaactgaaagcgatgctcaagtttggctatccgctgatcttgggcgggttggcgttttgggggttaaccactgtcgataggatgttcgtgcgagcctattccggctttgaacagctggcgatcttctcggtggcggttagcttcgccggcgtggcgagcatcctgcaaagtgtgttctctaccgtttgggcgccgatggtgtacaagctggcggagtctaacgaaggcggcgaacagcagatggtaaccaaggtcacgcagtgcatgctgattgccgtggtttgcctgttcagcctgggcgggcttttttcttggattacggattatgttttgcccaaagaatacattgacgttaagtatgttcttattgcttgtctgggcgcgccattgctttatacgctttccgagaccacggcggtggggatcggtttaagtcgaaaaacgctctattctatgtttgtttcattagttgctttggtcgtcaatatcacctcaaacgcattgctggtgccacgtttcggcgccggtggcgcggcggtaagcacctgtctggccttctgggcattcctgatcctgagaacggagttctcaattatcagctggaagaccatgccacgttttgaaatgtatttcttcactttcctctgtctggcgggggcgtcggtttcagcgctggcaggcgagaaaatgaaatatgagctgtttgtctattggggtgtcttactggccgtggtgctggtgaggaacctcaggttccttaagtcgttcgccaaacgataacgctttcggtcaggcaacccgttgcgggttgccgccgttttccccatttctacttctcatcatgacagcgcgatctcgctgacgtctcctcttgctcaacgcagccgcccccgaatctcctcctccggcagatccacgccgataaacaccagcgtactcttgcgctcttcctctggcagccattcccgatcccagtcggcgttatacagccgctgtacgccctggaacagcaggcggcgcggctcgtcttcgatagacagaatgcctttgtagcgcagcaggttgtcggcgtattccagcagcaggccttccatcacttcggagatttgcatcagcggcagcggccgttccagcgtcaccacgatcgagcggatgtcgctctgcggctgcgggatgcggtggaacagcggggcgggcggcgtcagattcagcttgtcgttcagcgtaaagccttcgatgtcgaacagcacgctcagatcgatatcgccgtgcgtcacctggtagagcggcgctcgggcgttcatccgctgcagccgttggatcagcgcctcgcagtccggcgccacgtcggttttggtcaacaggatgcggtcggcgtagcccacctgcgcctgggcgatgctgaactggctcagctgctgctcggcgtgcgccgcgtccaccagggtgatgatgccgtccagcaggaagcgctcgcacaggatctcgtgcgagaaaaaggtctgggtaatcgggccgggatcggccatgccggtgcattcgatgatcagccgatcgaacgtcagctggccgctgtcgacgccgtccagcagatccagcagcgcgtccgccaattcgttggacttgctgcagcagatgcagccgttgctcaacgtggtgatgcggctggcgcgatcgccgatcagcgcgtcgtcgatcggcacttcgccgaactcgttctcgatgaccgcgattttatagccgtgttcggcgttcaggatgtggcgcagcagggtggttttgccggcgcccaaaaagccggtcaggatggtgactgcaatgggtttcatacgggtccttgtgactgcgggttaacagcagcgcatgccgcctttgccgtcgccgccgtagcgcgcttgctggcgctcgcggaaaaattctttataggtcatcaccggcttgtccgggtggttgtctttcatgtgctggacgtaggtatcgtagtcaggcacgcccaccaacatgcgcgccgcctgcccgaggtactttcccgcctggccaagatttccgaacatagtttcttactcccaaataccctgcttacccttcgtctttcgaaccgcagcggtgttggctgcactcccgaaccccagtcacttacttgagtaagctcctggggattcgctcacttgccgccttgctgcggcccgaaatcctttgggtaccggttaactttcatgtcggtactgcataactgattttattatgcagggtatccgttaaatcacatcaatgctgggtcgaaactttgacctccccctcagttacgccgtcggcgggcgcggcctgcggcaccggcacgtaaggcgtttcctggtcggtgcgtttcggattcttgtgcgccgccatcgcggttttcacgccgtagaagatgatgctgtacaccaccagcaggaacagaatgctcagcccggcgttggtgtagttgttcaccacgatgtggttcatgttggcgatctgctgggcgctcagctcggcgccgccctcggcgatcttgcgtttgtattcgccggccaggaagaagaagccttccagctgcgggttgtcgctgaacagcttcaggcccagcgcgtaggtggtgcagatcagcagccacaccgccggtagtacggtcacccagatgtattgggtgcgcttcattttaatcagcaccacggtgcccagcaccagcgccacggcggccagcatctggttggagatgccgaacagcggccacaggctcttcacgccgccgagcggatccaccacgccctgatacagcaggtagccccacagcccgacgcagccggcggtgccgacaatgccggccaccagcgagtcggttttcttcaggaacggcacgaagttgcccagcagatcctgcagcatgaagcggccggagcgggtgccggcgtccagcgcggtcaggatgaacagcgcctcgaacagaatgccgaagtggtaccagaagcccatgttggcgcccggaatgatctggtggaacacgtgggcgatgcccaccgccagcgttggcgcgccgccggcgcggttcagcaccgaaggttcgccgatgtcggtggcggtctgcaggatctgttccgggctgatgacgaagccccaggaactgaccgccgccgctgcgtgcacggtcacgtccttcagcgaagccatgatcatcggcgcgtcttcggtgcccaggcggtgcaggtccggcatggtgatgcccagcgccgccggcggggtgttcatggcgaagtacaggcccggctcgatgatggacgccgccaccagcgccatgatggcgacgaaggactccatcagcatcgcgccgtagccgataaagcgcgcgtcggtctcattggccagcagcttcggcgtggtgccggaggcgatcagcgcatggaagccggagaccgcgccgcaggcgatggtgatgaacaggaatgggaacagggtgcctttccacaccgggccggtgccgtcgacgaactgggtcaccgccggcattttcagctcagggttgaggatcacgatgccgatcgccagcccgacgatcacgccgattttcaggaaggtggccaggtagtcgcgcggcgccaggatcagccataccggcagcagggcggagacaaaggcgtagccgatcagcgtgaaggtgatggtggtgtctttaaaggtcagcgccgggccccagtacgggtcgtgcgccaccacgccgccgaaccagatggcggccaccagcagcacgatgccgatgactgacacttcacccacgcggccggggcgcaggtagcgcatgtagatgcccataaacagcgcgatcggcacggtggagcagacggtgaacacgccccatgggctttccgccagcgctttcaccacgatcagcgccagcaccgccaggatgatgatcatgatcaggaagcagccgaacagcgcaatggtccctggtatcggccccatctcttttttgatgatctcaccgagcgaggcgccgttgcggcgcgaggagatgaacagcaccataaagtcctgcaccgcccccgccagcaccacgccgcccagcagccacagcgtgccgggcaggtagccgacctgcgcggccagcaccggccccaccagcggcccggcgccggcgatagcggcgaagtggtggccgaacagcacgttcttgttggtcggcacgtagttgaggccgtcgttgttgaccaccgccggggtggcgcggccggcgtccagcttcatcaccctggtggcgatgtacaggctgtagtagcggtaggccaccagatacaccgccaccgaagcgacgacgatccacagcgcgctgatgtgttcgccgcggcgcagcgccaccacgccgaggcaggctgcgccgagtatccccagcagcatccacggaatgtgctttaaaatcccctctcgtttcatgaggtatccttaattccagtctgcaaaatatgaatgaactcatccgcttgtaagagatgtcagagtggcgcggtgagccgtagcgtctttcccgaggtaaggcgggtttaggaacagctcatcatcgctgggggtaaggggggaagacaggcgtatttcgctcagcggtcagatccgccgggtgaacggttggattggcggggtgagcggtttgctgcataaccaacagccgcccgccagccgctgttgccaatgcagcacccgctttaatccgccggctttaaaccctcggtttatcagccagatgccttaacgcggcggttggcacgcattctgctatcggatttataaccaaaacaaggttttcaatatttgtaaatcgataatggttatatgcgtgccgcatcacggcgccaacgagcagagggagagaagcatgtcagcagcaaaccactcgcagcagcctattcagttcgcctactgggtgccgaatgtctccggcggtctggtgatcagcaacatcccgcagcgcaccggttgggacatcggctacaaccgcaagctggcgcagattgccgagcgcgccggtttcgactacgcgctcacccagatccgtttcaccgccggttacggcgccgacaaccagcacgagtcggtgtcgttttcgcaggcgctgctggattccaccgagaagctgaaggtgatcgccgcgctgctgccggggccgtggaaccccacgctggcggccaagcagatcgccaccatcagccatctttccaacgcgcgcatcgcggtcaatatcgtcagcggctggttccgcggcgagttcaaggccatcggcgagccgtggctggatcatgaggagcgctacctgcgctcggaagagtttatccgctgtttgcgcggcatctgggccgagcccagcttcagcttcgccggcgatttttatcgctatcgcgactactcgctgaagcccaagccgctggatccgctgccggagatcttccagggcggcagctcgcgggcggcgcgcgacatggcggcgcgagtctcggactggtacttcaccaacggcaacagcgtggagggcattcgccagcaggtggacgatttgcagaccaaggccagggccaaccagcaccgggtcaaggtgggggtgaacggcttcgtcattgcccgcgataccgagcaggaagcgcaggcggtgctgcaggagattatcgatcacgccaacccggaggcggtgcaaggattcggccatgaggtgaagaacgccggggcggcttcgccggagggcgagggcaactgggccaaatcctcgtttgaggatctggtgcagtacaacgacggctttaaaaccaacctgatcggcacgccgcagcagatcgccgagcgcatcatcgcgctgaaagacgccggggtggatctgatgctgttggcgttcctgcacttccaggaagaggtggcgttcttcggccgcgaggtgatcccgctggtgcgcgaactggagcgccagcgggcggcggcctgagttcagtaaacctgcctgccgttgatgccggtggggaaaatgccggtggcgaaaatatgaccgttggcctggatctggtcgtcgggcagcatctccagcgggaactcgcccgccaggcaactgagaaaggcgttgcgatcgtccgtggtggtaaagccgatcagatcgtagaacagcagcgaagcgatcagctggcgatgttccgggatgcgccgcagcagcgccgccgatggaaacggcaggtggaagaagaacgcgcaggcattcagcagcccctgctccttcaacgcctgggcgcagggcagcagctggtagtcgtcgatacagacgatgtcgcccgggcacaggtgctcgcaggcgatatcggcgaaacggcagttcagctgccggtaggcgcggtagttttccggcgtgaagtgcgccttctccggctggttgtggaacaccggccacaggccgtcgtggtagtagccctgatagtggcggcgaaactcctcgatcgacagcgggaaggtcacctgatcgtaaccggcgcgttggcggcaactgatcgggcgctgcgcgaaattctgcacgtcgccgttccagccgagccacagccccggttcggcgtcggccgccaacgtccggccggcgcaggccagatccttgccgtcgcattgtttgttggaaatcagcaccaaacgagacatcgggttctccttatcagtgcagggcgcgcggggcgtgcgccgcgcagtcggcgcgccagggcgcttgcagcacgggcagcgtgacgcgcaggccgcgcaatgccggatgcgccaggcagcagcgcgtcagccagcttcccagcccgacgccgcggtattcggcgctgacgaacagctcgctcaccgaggcgaaggtggcgtaatcggtcaccatacgggcgaagccgagctggtggcgtttgcggtacaggccaaagcacaggccgtggcgcgccaggcgctccgccgccgcccgatccggcaggctgaggaaacgctggatcgcctcgatatccaatagctgccgatcggtgctgatatgaaaaacgcctttgcgccagcagagcagcggctgtacgggggccaattgcggttgcatgttcatgattatccttaggttaacgaatcagtggatggttacagcatccagccgagttcggcggcggtgacctgttcctcgaagcggcgcagttcggcgcttttgcaggtgtgccacagggtgcagaacgccgggccgagcagctcgcgcagcggatcgctgtggcggaacagcgccagcgcctcctgctggccgagcggcaagggggcggcgttgtcgctttcgcagccgttggcggcgggcggcagcggcagcgggtgttccagcccgtgcagcaggccgccgagcatcaccgccagcgccagataggggttggcgtcggcgccggccaggcggtattcgatgcgctgattggcgctgtcggcgcagggcaggcgcagcgccaccgtgcgattgttgtggccccaggaggcgcgcagcggcacgtgcatgccggggcggaagcggcgaaacgcgttgatgttgggcgccaggatcgccatcgacgccggcatcagcgccagcatgcccgccatcgcctgctgcatgttgtcgctcagttcacccggcgcgccggtcagcaggttctcgccgtgctcgttctgcaggctgatgtgaaaatgcagcccgctgccggcggcatgggcgcagggcttggccataaagcaggcgtgctggtgatgttgctcggcaatctgccgcgtcaggcgcttcagcgccatgatctggtcgcaggcttccagcacgcgccggctgtgatgcaggttcagctcgtactggccggaagcggcttcggccaccacgccggtcagcggcaggctttgcagccgcgcgtgccgttcgatgtcgctcagcagcgcatggtggcgctcgggcgcatccaccgcgaagctctgcgtcgggcaggcttccgcctcggcggggcgctgcggatcctgcaggtagaactccagttcggccgccaccaccgggaagcagttgcgctcgtgcaggcgcttcagcacccgttgcagcaccacgcgcggctccagctcgcaggcgtcgccgtcggcgttttgcatcgtcagcagcagctgggcgtggcgttcgggatcgcgcgcgcaggggcgcagcgtgccgggcaccggcaggcacagccgatccggctcgcccgcccgctgccccagcccgctttcttcaatcacccggccgtgcagatccagggcgtagatcgacagcgggaagtagcagcctttttccaggccaaaggcttcggcgatcggcaggcgcttgccgcgcagctggccgttcagatcgtgcagataaatatccagctgttcggtatccggatagcgctgtaggtagtgttccagctctttgcggaaggtgcgcgtcggcgatgcgggcagctccgccagcagaggattgaacccgatgatattagcatgcatggcgcgctccagaacgaagaccggtcacggccagaggcagggataaacgcatgagacaactctcttgtgaggccatagcggcgatgtgaaaagggtatctgcggcggcaaaaactgtctgtaaaaacgccgtaacgttaacggggtgcggaataaaaatgccgtaaagagcgcggcgggttggccgggtcggcacggtctatactggcgagatgggccgtagaaggagagataacgatgaagagaatagggctgcttatcgccgcgctggccgcgttccacgccaccgcgtcttccccacaggcgtgggccgagagcgaacgggcgatgcgcgccgcctgcctgaaagccagcgggctaaaaaacgccagggtggaaggggagattattcactacggtgatgacgtcggctattcggcgctgtttatcggcgggtgctacccgcagccgtttatgaaaaaccagccgggcagggagctgtgcttatatcagcgcgccacgcagaaggcggcggtgcaggcggtggaggggagcagtgcgtctgctcaaccttgatgattgatgagataaataaaaatacagcctacggtggtaataattgcctctacgagcaaaagtataaagtccatcgccagccacttctgtagttcaggagaggcggttttttgcacgaaatcgtaggttttcgcatcgagccaaacgtgatcccttatttttatttttttcctcttcaggatccaaagaaaccactgtgccttcaatgaggtacctggcatgccgaggctatcggcaaaggcgacgtagggcggaataaaatatccgctgccggcgtaacgctgatagaacgcgtcaaactcttttttatggcgacggtagccaatgaattggatgaaggcgcttaaaaccagcagcgttaagcataatatgacaagggttttcatcgagcagcctgaatcacgatattctcgctatcatcataaagatcaatgtcatgatgaagagcaggccttccagcgccaaaagcgtgccgttgtttttcatccaggtctgcaagcgttcagatgatgaaagacgaacaaattcataggtcttggcgggaagatattggtttttcttcaccttgattttcttgccgcaaaggatccctctgaaccattggactttgatggaagtacctaaagagccaaggccatcggcaattgcgacgtgagcagggacaaagtggcactgttgggtatagcgtcgataaaaaacatcgaactcgcgtttatagcgacgagagtaaatatattgagcaagccaacaaactaagagcagcgcagctgcaataagtgatgctgttttcataagccaccggctaaggttcaaggggcgttatgccttgctcaaaaaagcaaagatacacatcaacgccaaacaccccattttcagcacgcttaagatgaagtcttttcgaatccagctcttcagatgttgagatgtgttttcattcacgaattcgtaggtttttgggctcagaaaagcgtttttccctatctttatttttctgccattcaatacccaacggaaccattgtgctttgatagacacaccgagcaaaccaaggttatccgcgaagatgacgaatggaggcaagggatgggcgctttgcacataacgttgatagaattcagtaaattcgtttctatagcgccgatagtaaagatactgcaccagggcgctaatcaatgtcagagtgaagaacaggacgatagcgattttcattattcaccaaaaatgaaaccagtaatgctgtcggcggctacaccgccaccccaactgccagctgcgccacccagagcagcgcctgctataccacaagctaaaataccggtaccaaacgtggaggcgcctaagacgatactgcaagccgtcattgctagcattgcaccgccttcaccccccaaaatccccgccgcagtacttgccgcaaaatgactgtatcccttcaccgcgatcttggcgcactcctgttcgcgaccggtggtgcaggcgttgtagacgtcgttggtggtattcagcccactcaatccgatgccgatccagccgccggctttcataaacttggccgcccggctggcgctgtcgacgtagttcgaataacccttgatggcgccgacgccggcggtgctccattcatgcaccagcgatttactggagagccctagcgcgtgtttgatttgcgcatactctttcatattgagttgagcacgagtaaggcgattcagtaacggttttaatgtaccgaacagccgcgctcgttccacctgaaactgggtgccaatcaacgcgccactcgtgcggaactgattttggtaggttttttcaatctcaaccaggatattcttgatctggctgaagtagcgttctccggcatccgaagccagcccgacgaccgtttccccatagctggtgaaggcggcgatagcggcgtaattgcggtgcaagaaggtggagaaatcgctgtcaccggctttcaccgctttgctggtgcggcttttggcctgcatcagggcggcgatctgcgtagattggttatgattgcgcggatcggcgacgatcagcatttgccccggttgaaccagcggcgtatcggcattgagctgcataaaaaaacgtgccgcttccgatggcttgccaccgaacaggtagttggcgtggaaggcgagcgggcccgtttgttgggcgatgcaatagcccggtgcgatgctgctggacttctgttccatgtcgaaaagcctccttatttttaggaaacttaacattttctacagggtggtaacaggttctggctcacgctctcgatcggagaatcatctgaaaataccggtgccgccttacccgccacttcccgccatctcccgttcgattaccgtcgccagcgcctgcgcggcggaagagagttggtgctgcgccaggcggatcaggcccacgcgccgttcgataatcgggccgatcagcggcacgcagaccgctcccagctcatccatctgttgctcgcacagcgccggcaccgcgctggcgccgaggccgttggccaccatgcgcccgaccgtcaccagctggtggctctcaaacgccacctccagcgttcgcccgctgcgggccagcgcctgctccagcagcagccgcaccgccgatggccgctgcagggtgatgaaatccagcgtcagcagctccttccagctcacctgcgccctgcgtgccagcgccgaatccttcggcaccaccgccagaaagcgatcgcggcacagcggggtgaagtgcagggtgtcgctcggctccggctcgaaggcgatacccatctccacccggccttcgcggatcatttcaaacacctgctcgttgatgacgtcgtgcaccgccacgttgatgccggcgtaacgatcgcgaaacgccttgaggatcggcggcagcgggttgccggcgaacgacggcatggcggcgatcgccaccttgcccatctgcagggtgaagcgctggcgcatcgcctcttccgcgttgtcccaatccgccagcagctggcgcgccatcgggaagaaggtttcgccctccggcgtcagcgtcacccggcgggtggtgcgcagcagcaacggcccccccaacgcgtcttccagcccacggatcgccaggctgagcgccggctgagaaatattcagccgctcgctggcctgggcgaaattcagagtgtgagctaccgctaaaaacgcgcgtaactgtttgatgctcattttcattttggttggcgttaactctttgttaattgtcggttaacgagtaattaataaaaattctaaatgaatgcggcataaaaacaaaattaacaaatcatttttgtgacctgaagatgccctcacgcaagccagggcatttcgccctgcgccgcaacatgcaggggcaacgatatggcagggctcgacaaacgcgtcggcagctaccaggaagcgctggcaggcctgacggacaacatgacggtgctggcgggcggctttggcctgtgcggcatcccggagaatctgatcgaagagatccgccggcgcggcgtgcgcgggttgacggtggtctccaacaactgcggcgtcgacgggttcggcctcgggcggctgctggaaacccatcagatccgcaaggtggtgggatcgtacgtcggcgaaaacgcgctgttcgagcagcaggcgctcagcggcgagctggaggtggatctcacgccgcagggcacgctggcggagaagatccgcgccggcggcgccggcatcccggcgttcttcaccgccaccggttacggcacgccgatcgccgaaggcaaagaggtgcgcgagttcaacggccgcccttacatcatggaaaccgccatcaccggcgatttcgccatcgtgaaaggctggaaggccgatcacttcggcaacgtcatctaccgccatactgcgcagaacttcaatccgctgatggcgaccgccgggcgcatcacggtggtggaagtggaagagatcgtcgcgccgggcgagctggatccggcggcgatccacacccccggcatctacgtcgatcggctgatccagggcaccttcgagaagcgtatcgaacaacgcaccctgcgggcataaggagaattcgcatgcttacccgtgaacaaatggcgcagcgcgtggcgcaagagctgagggacggttactacgtcaacctgggcatcggtattccgacgctggtggccaactatgtgccggcgggcatggacgtgatgctgcagtcggaaaacggcctgctggggatgggcgagttcccgaccgagcagcagctggacgccgacatgatcaacgccggcaagcagacggtcaccgcgcgcctcggcgcgtctattttcgattcggcgcagtcgttcgccatgatccgcggcggccatgtcgatctgaccgtgctgggggcgtttgaagtggacgtcgagggcaacatcgcctcgtggatgatccccggcaagatggtcaagggcatgggcggcgcgatggatctggtggcgggggcggagaacatcatcgtggtgatgacccacgccgcgaagggcggtgagtccaagctgctgccgcgctgcacgctgccgctgaccggcgcccgctgcatccgcaaggtattgaccgatctggcctacctggaaattgaagacggcgccttcgtgctgcgcgaacgcgcgccgggcgtcagcgtggcggagattgtcgccaaaaccgccggccggctgatcgtgccggagcaagtgccggaaatgcgtttctgagacgggaggtgaatgtgcaacaacgtgaagtggtgatcgtggcggcgacgcgcacgccggtcggcagttttcacggcgcgctggcgccgttgacggcggtggaactgggcacggcggcggtgcaggggctgctggcgcaaagcggcgtgccgccgcagcagatcgatgaagtgatcctcggccaggtgctgaccgccggctgcgggcagaatccggcgcgccagaccgcgctcaacgccgggctgcccgttacgacgccggcgctgaccatcaacaaggtgtgcggctccggtttgaaggcggtgcatctggcggtgcaggcgatccgcagcggtgacgccgacgcggtgatcgccggcggtcaggagagcatgagccagtcgccttacctgatggccggcgcgcgcgccggtctgcgcctcggtcacgcgcagatgatggacagcgtgatccacgatggcctgtgggacgcgttcaacgactatcacatgggcatcaccgccgagaacctggcggagaaatacgccatcagcagagaagaacaagacaggttcgcgctgcgctcgcagcagaaggcgctggcggcgcagcaggccgggcgtttcgtgcaggagatcacgccggtgacggtgccgcagcccaagggcgaggcgctgcgggtcgagcgtgaccaacagccgcgcgacaccagcctggaggcgctggcgcggctgcgcccggcgtttcgcaaagagggcacggtgaccgccggcaacgcctcgtcgctcaacgacggcgccgccgtggtgctgctgatgagcgcggaaaaagccgccgcgctgcgtttgccggtgctggcgcgcatcgccggttacgcctcgtcgggcgtcgatccggcgatcatgggcatcggcccggcgccagccgcgcgccgctgcctggaaaaagccggttggcggctggaggaggtcgatctgatcgaagccaacgaagccttcgccgcgcaggcgctggcggtgggtaaagaactgggctgggaggcggagcgggtcaacgtcaacggcggagcgatcgcgctggggcatccgatcggcgcgtccggctgccgcattttggtgtcgctgctgttcgaaatgcagcgccgcgaggtgaacaaggggctggcgatgctgtgcatcggcggtgggcagggggtggcgctggcggtagagcgcccgtaaacaaccgaggagggcaccatgcagtcatctgactatgcggtactgggcgccgggctgatgggggtgggcatcgccacccactttattcgccacggccatgaggtgctgctgtatgaaccggatccgcagcgccgggcggaagcgccggcggtggcgagcggcattctggccgagctgagcgacgtcgggcagtttgatcgcggcgaacgcgacgcggcgctggcgcggctgcgcgtgaccggcgatctgaacgcggtggtgcgtgcccggctgcttattgaggcgatcccggaacggctcgagctgaagcatgcgctgtatgagcagctggaagggctgatcgccgacgacgcggtgatcgccagcaacaccagcggcctgccgccagacgagctggcggcgcgcatgacccatccgcagcgcctgctgatcgcccatttctggcacccgccgcacctgatcccgctggtggagatcgtgcccggcagcgccaccgaaccgcgtcatctggcggcggtgcaggcgctgctcggcgagatggatcttgaggcggtgctgctggagcgcgccgcgccggggtttgtcggtaaccggctgcagtttgcggtgctgcgcgaggcgctgcacatcgtccacagcggcatcgccagcgccgaggtggtggatcaggtgatgcgcgcctcgctggggcggcgctacgccatggtcggcccgctggaggccgccgacatgaccgggctcccgacggtggcggacatcgcccgccacctgttcccggaactggcgaccggtgacgagatgatggcgctggtggaacagcggctgcagcgcggcgataccggccagcgcagcggccggggattttatctttgggatgaagcgcgcagggaacgcatccaacggcgacgggcgcatcagctgcgctttgcgctgaaaccgtaatttcgcacgccgtacctgacaataacaacgatagcgaggtgcctgatgagcgttttgattgccctggcagcactgggattactgatgctggccgcctaccgcggctacagcgtgattttgtttgccccgatcgccgcgctgggcgcggtgctgttgaccgaccccggcgcggtggcgccgaccttcaccgggctgtttatggagaagatggtcggctttgtgaagctctacttcccggtgttcctgctgggggcggtattcggtaagctgattgagctgtccggtttttcccgttcgatcgtcgcggcggcgatccgcattctcggccggcgtcacgccattccggtgatcgtgctggtgtgcgcgctgctgacctacggcggggtgtcgctgtttgtggtggcgttcgcggtttatccgttcgccgccgagctgttccgccagagcggcatccccaagcggctgatcccggccaccgtggcgctcggcgccttctccttcaccatggacgccttgcccggcacgccgcagatccaaaacatcatcccgaccagcttcttcggcaccaatgcctgggccgcgccctggctggggctgatcggctcgctgttcatcatcgcggtcggcctgctgtatcttgaacgccagcggcgcaaggcgcagttgaagggggagggttacggcaccgagctgctgaacgaaccggaaaccccggacgatatcaacctgccgaatccgctgatcgccatcctgccgttgattctggtcggggtattcaaccttgccttcacccattggatcccgcagtggtacggcgccagccacgatctgacgctgccggggctggccaagcccatcaccaccgatgtggcgaagatcaccgccatctgggcggtggaagcggcgctggtgtcgggtattctgctggtggtggcgttcggctttggcaatattcgcggccggctggcggaaggcagcaagacggcggtcggcggcgcaattctggcggcgatgaacaccgcttccgaatacggcttcggcgcggtgatcgccgcgctgccgggctttttggtgctgtcgcaggcgctgtcggcgatccccaatccgctgctgaacgaagcgatcagcgtcaccctgctggccggcatcaccggctcggcctccggcggcatgagcatcgcgctggcggcgatggccgataacttcgtggccgccgcccacgccgcgcatatcccgctggaagtgctgcaccgggtggcctcgatggccagcggcggcatggacaccttgccgcacaacggcgcggtgatcaccctgctggcgatcaccggcctcagccaccggcaggcctatggcggcatcttcgccatcaccctgatcaaaagcgccgcggtgctgttcgtgatcggcgtgttctacctgaccggcattgtttaaaggagcgataccatgagtgtacaaggcaagaccgcgctggtgaccggctcgaccagcggcatcggcctcggaatagcgtccgtgctggccgccgctggcgcgcgcgtgatcctcaacggcttcggcgatgtggaggcggcgaaggcgcaggtcgcccggctgggcgccgcgccggggtatcacggcgccgatctcggcgatgcggcccagatagcggacatgatgcactatgccgagcgtgagttcggcggcgtggacattctggtgaacaacgccggcattcagcacgtggcgccgctggatcagttcccggtggagaaatggaacgccatcctcgccattaacctgtcggcggtgttccacacctgccggttggcgctgccgggtatgcgcgagcgcaactggggacgcatcatcaacgtggcgtcggtgcacgggctggtggcgtcgaaagacaagtcggcctatgtggcggccaagcacggcgtggtggggctgaccaagacgctggcgctggaaaccgcccgcacgcccgtcacctgcaacgccatctgccccggctgggtgctgacgccgctggtgcagcagcagatcgacaaacgcatcgccgccggtaccgatccgcagcgggcgcgcgatgagctgttggcggagaagcagccttcgcaagagttcgtcacgccagagcagctcggtgagctggcgctgttcctatgcagcgatgcggcggcgcaggtgcgtggcgccgcctggaacatggacggcggctggctggcgcagtagtgagattttccccggagcgcgcaatgcgctccgtcgttatttcccgcctttaattaattccatcgcgtgacggtttacctgcggcaataatatttttttgttatttgctatcattattcccagataatcacgaagggttattttgggtgaaacgtgcggattggtttatttcgtgctgcggttattacattgtttttctccgtgttacaggtgaacacgtttttgctgaaattaaatccaacctaaaataatggcaggttatggcgtgaatttttatatcttgcgtgcgctgttcacatcggttaattatttctgcgtggcttaagaccaccgcgtttataacaataattttttcgggcaggggtaataatgagaaaaaatacaacgccaatattcattggcggcgtcttgctgtcggcgatttccgccggcgcgcaggccgagatcaccattctggataaaaacccgcagagcaatgtgttgctggcgccgctcagtttaaaggtgggcggcagcattcgccccgagtggatcttcaataacggcccggagccgggctatgacaaaaacggccacgacggcggcacgcgttttcgcttcagcggcgattatgcgctgacgcaggacacctcgatcatcggctattacgagtggggcgtcgatctggcgcacgcgctcagctgggacgggcactataacgaagacggcaagcgcgactatcagcgccagctgtacgccggcttcaaagacgatcgttacggcaccctgacctatggccatcaatacggcatctattattcggtggtcggcatcaaaagcgacgtctgggataacgatggccatgcgggcggcaccggcatcggtatttccggcgactatgacggcggcaataaaccgaaaaacagcatcaaatacaccaatgatttcgggccggtcacgctgtacgccaactacttattgccggaagacgatctgcacaccgcggataacctgatttaccgccgcaagggcggtggcgggctgggcttcgattataaggtgacgaaagacttcaccttcagcgccgcctacagttataccgatgcgaagatcaaagacaatctgtaccacgaacaggattatcaccagcagttgtccggcaccgcgttaacctggcagccgaacaactggtatatcgtcggcaccgccagctactacaaagattatgtgccgagcacccgacagcgcacgctgtcgcacttcttcgccggtgacggctacgggctggaaggcttcgtcggttacaccttcaatatcgacaagccgttcctcaaatccgtccagccttatgtggcggcggactcgctgcggctgaagggagacgaggcgtatcacgccaaccacgtctatcttggtgcgggcaccaccatcggttacggtctgtcggtgtatgtggagcgcacgctggccaacagtagcgacaacgagccggactccacctggattacggtgttctacgacttctgattttcacctgctccaagccggcgcctgcgccggcttttttacatggtgatcgcaccgcccagggtctctccagaggcgttgcgctccgccaggtagcgcgccggcggtttgcccaccgcctttctgaacatggtgacgaagccgctggcgctctcgtagcccaaatccagcgccaccgtctgtacgctctcgccctgcgtcaagcgctgcagcgccagcattacgtgcagctggcgccgccagtggccgaagctcatgcccatctgctgttgcaaggtgcggctgagggagcgctcgctcatgccgatgcgctgcgcccactggccgagggtggatttgtccgccgggcagctcagcatgccttcggtcaactgccggatgcgcgcgtcgtcggacaccggcagatgcagattctcgatcggcgcggccgccaactgatccagcaataccgccgtcagacgcccctcggcgccctgttcgtcgtaaagcggctcgaaggtgctggcctgcagcagcagctcgcgcagcagcggcgagaccgacagcgtgcagcagctttgcggcaggccggcggcggcatgttgatcgacgaacaggcagtaggcctcggtggagccggcgccctgggcgttgtgcaacacgttgcccggcatccacagcgcgcactgcggcggcaccagccacagcccgttttccacttcgcagcggatcatgccgcgcacggtgtagatcagttgcgccttccggtggcggtgcggctcgacttcccaatcctgctcgagagtcgaaccttgcagggcaaacagcgggcgcggcacctgatcgatatccagacagtggcgggggatctgtactttcatgagaatagttctcaatttggcggaattgaaaagtattatgtcctgattgcgcaatgcggtctagcgccggtgccgataaagtaagcgccagttctaaaccctttcgcgaggaaactgattatgtcattggataccgccgactttccgctggtgtggatgcgccgaaacgggcgcgatacccaggccgagctggccgaattcagcgcgctgctggcgcgcgccgagccttttgttctgctcaccgaccgcagcgtcggcgatgaagaacaagaacatgaccgcgatgctcgcacccaggtggcgctgtggaaacgtgataaccgcgaggcgctgaagcggtgggtgaaaggcatgatcatgctggagccggacgacgccaaacgcgcggcggcggaagcattcgccgaatacggcgccaaattctggggctatccggtactggtggccgccgatgaagccgcagggcgggtattggcgcagacgttattgttaaaataaggggaacaccatgcaccagcaacaggtgattgaacagctgctggcctggatcgagcagagcctggatcagccgctgacgctggacgacatcgccgccaagtccggctactccaaatggcatttgcagcggatgttcaagcagcataccggccatattctcggcacctacgcgcgccgcagaaggctgaccgccgccgcgcgcgaactgcgcctgaccggcaccagcgtggcctgcatcgccgatacttaccagttcgattcacagcagaccttcacccgttgcttccgcaagcagttcggtctgccgccggccagctatcgtcgcagccaggattggtcgagctatgggctgcagccgccgctgcgcctgactgaagcgccgttgccgcaggccgatatcgtgacgctgcccgcgatgcagctggtggggcacactcaacgccgccactgcacgctggggcagctggcggcctccaagtgcgagctgcgccgccacgcctggcggcagttgctgcagccgcaggcgctgccggaggtggtatacggcctcaccagtctggaagttgaccggcgccgccggggcagcccgcgcatggcctacaccgccgctctgccggacgaaggggcgccgggagagcgggtgactatcgagcagggcgagtatgcccgtttcacctaccagggacaggcggaagggttacaaaactttattgtccggctgtatgacaccgccatgccgcagatgaacgccattcgccggccagggcaggatatcgagcgtttctacccggcgcaggagggcagttgcccgctcggcggcgcggcgatccgctgtgaatacctgattccgatacggcgggaggaagcgttggccgccgccagctaggcggcggttctcgcaaaaaatcgccttcgtggcgcgtcaggttacaaaaaattgcgatattacatcggtaatggttcacactttgattgatgtgcacatataatgcgcatccggtcaaatccccctggtttttcaggccgcagcgccgttggctgccggctgaaattcaacggggcaaagtggccgtagaaaccaatacccataatcgccagtggccttgaccaacacgaagatgaaaatgagcattcgcgcgttattaaccctgtttacggcactggttgcattcagccaggctgccttcgccgtcgtttacccgctgccgccaaaagacagccgtttggtgggcgagaatatccaaatcaccgtaccggaagacagcaaactgccgctggagagcttcgccgcccagtatcagatggggctgagcaacatgctggaggccaacccgggcgtggatccgttcctgccgaaggccggcagcaccctgactatcccgcagcagctgatcctgccggacgcgccgcgtgaaggcatcatcatcaacagcgccgaaatgcgtctgtactattacccgaaaggctccaacaccgtggtggtgctgccgatcggcatcggccagctgggtaaagacaccccgctgaactggaccaccaccgtgcagcgcaagaaagacggcccaacctggacgccgaccgccaaaatgcgcgccgaatacgcggctgacggcgagatcctgcctgcggtgttcccggccggcccggataacccgatggggctgtatgcgctgtatgtcggccgtctgtatgccattcacggcaccaacgccaacttcggcatcggcctgcgtgtgagccacggctgcgtgcgtctgcgcgccgacgacatcaagtacctgttccagaacgtgccggtcggcacccgcgtgcagttcatcaacgaaccgatgaaggccaccgtcgaaccggacggctcgcgctacgtggaagtgcacaacccgctgtcggccaacgaagagcagttgcaatccaaggatccggtgccgttgaccatctctgcgccggtcggcaaagtgctgatggacgccggcgtcaaccagagcgaagtggacgcggcgatcaaggcccgttccggcatgccggtgaaagtgaactgattgcccagagcttcagtgaacgcgataaaaaagacgcctgcgggcgtctttttttatgctttcagcttccgctgttggcgcagtgaatttattgcttccctatcatcgtctttaaaacgaaaagcgccgactcatgttggtctttattgactcgttcgagatacatattatcaatcgcgtcggcgatggggcggctggcttcgaacagcgcctgcccagcaggcgtcaggtaaataaatcggcggcgcttatcatgctcgccggcttcccgttttaatagaccttttccttccatgcggcctagcaattcggccagcgcggctttactgctgatcgccgcttccattaattcgatttgttcaatgcccggcgtttctgaaacggtggccagaatggaatattgttgtttgctgagttcaggaagcgatttttgccattgagcactatgatcctgaagcagttcgcgaatgaggtggaaaaaagtattggccagcgttctgttcatacattattccctgaaaggaaaaaagctaacaataatatcaatataacaaaataagccgataagggatacctgcccggaaagttgttcgtttacgaacggttacatattgcccacttgttttatcgctatctcaggactagatttgataaatcgttcgcatacgaaccttgtggggtgttgcatgaaattagtgatcgcgatgacgggcgcgaccggggcgccgctgggtacggcgctgcttcaggcgctaaaagacatggagggcatagagacgcatttgatcttgagtaagtgggccaaaacgaccattgaactcgaaacaaatttcaccgtgcatgacgtgatggcgatggccgacgtgacgcacagttctgccgatcaggccgccacgatctcttcaggttcttttcatacggacggcatgatcattattccctgcagtatgaaaacgttggcgggtattcgagccggttatgcagaagggcttattggcagagcggcggatgtgattatcaaagaagggcggaagttggtgttggttcccagagaaacgccgttgagcactattcacttggaaaatatgctcgcgctctcgaaattgggggtgtcattggttccccccatgcccgcttattataaccaccccactcatattgatgacgttaccgatcatattgtcgcacgcgtgctggatcaatttggtcttgatcatcgccgggcaaagcgctgggcaggactaaaagaaaatagcaaaaaaaccactgacaccgaggaaggttaaatatggcttatgacgatctgcgaagttatttagcggcgctggatgaggccggacaattactcgatattaccgaggaggttcaggcggaaccggatatcgccgcggcagccaacgccacaggcagaatgggtgagggcgcccccgccattgcattcaggaacattaaaggttttgaacacgcgcatgtggtcatgaacaccatcgggtcatggcagaatcacgccatagccctggggctcccgccggccacgccggtgaagcagcaaatcgatgagtatattcgccgctgggatcattttcccgtctctgcggaacgtcgcgataatccgccttgggccgagaacgaggtcaacggtgaggaaattaatttgtttgagatcctgccgctgtttcgcttaaacgacggcgacggtggattctacctggataaggcctgcgtggtttcccgcgatcctgaagatccgacccacttcggcaagcaaaacgtcggcatttatcgcatggaggtgaagggcaagcgtaagctgggcctgcagcccgtgccgatgcacgacatcgcgctgcatctgcataaagcagaagagcgcggcgaggatctgcctatcgccattacgctgggcaatgacccgatcattacgctgatgggggcgacgccgctcaaatacgatcagtcggagtatgaaatggccggcgccctgcgtgaaagcccgtacccgatagcgacggcccccttgaccggctttgatgtgccctggggttccgaagtcatcattgaaggggtgattgaaggccgcaagcgcgagattgaaggtccgttcggcgaatttacggggcactattccggcggccgcaacatgacggtggtgcgcatcgataaggtttcttaccgctcgcggccgattttcgaatccctgtatctgggcatgccctggacagaaatcgactacctgatggggccggccacctgtgtgccgctgtatcagcagttgaaagccgagtttccggaagtgcaggcggttaatgcgatgtatacccacgggttgctcgtcatcatttccaccaaaaagcgttacggcggtttcgcgcgcgcggtggggatgcgggcgatgaccacgccgcatgggctgggctatgtgaaaatggtgatcatggtcgatgaggatgtcgatcccttcaacctgccgcaggttatgtgggcgctgtccgccaaggtcaatccggccggcgatttggtacaattgccgaatatgtcggtgctggagttggatcccggctccagcccggcggggatcacggacaaactcatcattgacgcgaccacgccggtggctccggatacgcgcggccactacagccagccggtcaaggatttacccgaaactgccctgtgggtggataaattaaccgccatgctggctaaccgtcattaaggagttcctatgatttgtcctcgttgtgccgataaacagatagacgtcatggcgcattcaccggtcaagggcgtgtggacggtataccagtgtcaacactgcctttatacctggcgtaataccgaacctgctcgcagaacggaacgggagcattatccgcccgagtttcgcatgactcagcaggatatcgataatgcgccggaagtgccgaccattcctcctcttctgaggaaatgaaaccgcaggcggggaaaagcccgccttttcatggaaataacaatgatgaaaaatgaagacgtcgttctgcttgacgccgcctggcagccctgcgggacgacgcccaaagatcaggtccacacgcggcatacgccgctgcatctggctttttcatgctacctgtttactgtcgagggtgcagtgttggtcacccggcgcgcgttgagcaaaaccgcctggccgggggtctggaccaattctttttgtgggcatcccctgccgcaagaggcgctggcgcaggccgttatacgtcgcgctcaggttgaattgggcacggaagtcgagcagataacgctgctgagcgacgccttcagttatcaggcgaccgacgtgtccggcatcatggagaatgaggtttgcccggtatttgccgcgtattgtaaaggcgctctctgtgctaatccggatgaagtggcggattatgtgtgggtcgatctcaataacttaatggcggcggtaaaattaacgccattcgctttcagcccgtggatggtttctcaattgaataccggtgcgataacatcaggtttgaaaaaatacagggatgccataaccataaagagcgctgcgcgcgacattagggacggtgctgtaataaaataaatagtcaccgtaagggtgactatttattcattcatgtttacaggctgccgccgaccgaggtcgaggtggagccgatagtctcgcggaaatgtttcgcgtagtcggccacttcctgctgcgtatgcgtcaggccataaagacccagccccacaccgcctgcaacgccgccgatgatggtgccgaccaattggccgaccgcaccggcaataaagccgcctgcgcctgcggatttacctgcaatcagcgcgccggtcatggcgccgtccaacagcccatcccaggccgcgttcagatcgccaccgctaacgtactgttcttcatattgactaagtactttcatatacaatccttataaataaaagggtgacttagtgggtttaattaaattctaaaataacaccgtagcgctatttcactttaaaaatataacggctgccatttgattggcaatattccattcaacgaagggtgttatttggttaaatatagtcgcatttatttttggcgagtgttttaaagagggggattgggaattttcttgggaaaaatagcagatatcgctgggaggtgagaagcaaagccgccaccggttggcgcagcttgtcactattttcacatttattgtctcgtcattcgcatggcgttaggcccacattgcaattattccattaaaaactatcgctaattaatgagttatatatccgcatttattgcccgccattgaaaaaattctcgcaaaaaatctccgctgtgaaaataagatcacacaatcgtaacaaaaggtaaacaaagccctcctatattggctgcttcgcttttggagggagtgtcatgcgtaactggaacgaaccgaaaaagaacaaagcgcacatcgaactgatcccgatgatcgacgtgatgatgtttttattggtgtttttcgtcttgatcagcctgaacgtcattccggcgctcgggctgaaaacgcagttgccgtccgccggcagcgcgcaacagctgaaaccgcagaagaaagcgatcatcacgctgggggccgacgaacagctgcagctggatggccagccgatcgcgctcgacgcgttggtcaacacgctgaagcaacagcagcaggccaaccagaccaccaccatcatcgtcaacagcgacaaaggcgtggcggtcgagcggctggtggcggtcatggacaacctgcgccagggcggcttcttctccgtctccatcgcgacacggaagctgtgacatgtatctgctctatcgctcacgtcatcttttcagctggttgccggcgctgattgtcgccggttgcctgctgttcgccagccaacaggcggcgctgaagatccagccgcgctacgacgaaaccgccattgaactggcgctggtggagcctgaaccggcgccggaaccccaaccggaaacgccgccggagcctcagcccgaaccgccgccgcccgagccggagccgctccccgaaccggtggtgccggcgccggaaccgatcgtggaagccaagccggtgccgaagccacagccaaagcccaaacccaaaccggtgaaagagaaagccaaaccggtagagaaacctaaaccgacgccggcgcccgccgcaccgcgcgcgctggtcagcaaaccggcggcgcagcccgcaccggccgcccccgcggcgccgaaggtgaacgcgcaggcgatagaaaacggctacctgctggccttgcgccgtgagctggaacagcgcaagcgctacccgagcgggcggcaggcctcgctcgagcgcccgcagggcaacgtcgaggtgtggctggaggtcgatcgcagcgggcgggtgctctcttccggcatcgccaacaaggccgccagcatgctgctgaatcgcgcggcgatgagcagcctgcaaagcatcagttcagtaaagccgttcccgagcgaggcgttcgccgggcaaacaaccaaaagatttaccgcgacgttcaattatcaggcgccttagcgcaagggttaatcgtttgatttttatgggatgcacacaatgaaatcgtttaatcgttctgggatctatctggcggtgatgtcggcgatgctgccgggcgccgcgctggcggccgacgccaccgatgtcggcaccatcagcgtcaaggggcagtcgctcggcggcggcatgatggtgcaggacgacagcgccaaggcgcgctccaccgtcaccaaagaggcgatggacaaaatgccgtcggcggccaacgccatcgataaactgaaatacacgccgggcctgaacgtcaacagcaacgacgccagcggcctgagcggcgtggactacaccatgcgcggcatgaactcggatcagatcggcctgtcgatggacggcatcccgatcaacgactccggcaactacgcggtctacccgaacctgctgggcgacgcggaaaacctggaggaggtgttcgtcacccagggggcttccgaagcggacggcccgcacatcggctccagcggcggcaacatcggcctggtgacgcgccgcccggcgaaagacttcggcggtttcgtcaagcagacgctgggcagcaacagcctgagcaaaaccttcgcccgcctggagaccggcgagtacaacggcttcagcaactggctctcctattcgcacaccgaggcgaagaaatggcgcggcgaggggcggctgtactccgacaagttcgagatgaattcgctgtatgaagacggcaacggcaacagcagcaatctggtgatgaagtacaaccgccagaacaacaccaactacaacaccctgagcaaggcgcagttccaaaacgacggccgtgacaccgattatgtcacctcgccggagtacaacagcaaagggcagttgaacaagtattacaagattgaacgcaacccgttcgagaactttacgctgtcgttcacccagaaactgcagctgcgcgacaacctgtcgctgaccctgcagccgtattactactggggcaacggcggcagcttcaacggccagacggcgtcggtattgtccagcacgtcggacagagccgggcagtatgacctcagcaacctgcagtccaacacctattaccgcccgtcgtggacccagacctggcgaccgggcatcaccaccaagctgaaatgggacattaacgatcagcacagcctggatatcggctactggtatgaacgcgcgcgccaactgcagactcagccgttcatcagcatcaagggcgacggcaacccgtcacagatttgggggaaacccggcggttccgatcaggtgaaggacgccaacggcaacaccgtgcaggggcgcaaccagtacaccatcaccccggcgcagaaagtgtggctgcaggacacctggttcgccacgccggactggaccttcgtcggcggcctggcctatcagtacgtggagcgtaaaggggacaaccgcggcagcctgtacaacgtgccggagaagcgcaaagccacctatcacgaattcctgccgaacttcagcgccagctataaggtgaaccaggaaaaccaggtgttttacaacctgacgcgcaacatgcgcacgccgcccaactacgtgctgtacaacgtcggcgattcgctcagcaccaagccggagctgagctggaaccacgaactgggctggcgtttccagcaagaggacatgctgctgagcgccacgctgttctacatgcgctacagcgatcgccagatctccaccaccaacgcggccggcgactacgagatgatgaacatcggcaacgtggagaacaaagggctggagctggagtggagcggccaactgccgcataacttcaactactacacctcttatacctatacccaatcgaagcagaagagcgacatcgtcagcaacggcgggcagccgctgccgacctccggcaaagaggtgccgaacgtgccgaaaaacctgctgaacatgacgttgggttatgacgacgggctgtactacggcagcgtcagcggcaagtacgtcagcgcgttctatggcgatctgaccaacgacgagaagatcggcgggcgcacggtgttcgatctggcggcgggggtgcatctgccggtggacaagaaaatcgtcaaaagcgccgcgctgcgttttggcatcagcaacctgtttgacaaggaatacctgacctcggtgcgcaccaccaccttcaacgcggcgccctacggcggcgtgaaggccagcaccccgtattacaacgtcggcgaagaacgcaccttcagcgtctcgctggaagccaccttttaactgaacgccccgctgcctgccgggcggcggggaagaggaaccctgtatggacgccaatctgttgcacgacattattttctacgtgatgtacgccgcgctggcgattgcgctggtgatcatcatcgaacgcacgctgtacttcgcctatacccagcgccaggcgcgccggctggagcaggcgctgacgccggaggtgcgccgcgcggccgatctgccggacgcgctgacccagcgcaacagcctgccgatggcggtgatcgcgccggtgctggcgcagaaacaccgggccggcgatcgcgaggcgatcggcgatctgatcgacgcccagtacctgctgagcaagccgccgatggtgcgcggtctgtggctgctggaaaccgtggtcaccgccgcgccgttgctggggctgctcggcacggtgatggggatcatcgaaaccttcaaggcgctggccgcctcgggggtgtccgagccgagcctggtgtcggccgggatgggcaccgcgctgtacgccactggtctcggcatcgccatcgcgctgctgtgcctggtggccaacaacttcctgcagagccgcatggagcgcatcaacgagctgctgaaggtgctgctgatccgcgccggtcaaccggccagccgcccggagagcggcagcggtgaacaatgggttgacagcggggcgccgcgctatgcctaatggccatccaacacggcggccgctcggccgcctttatacggcattgtggggcggttgtttgttgatgttgagccagagcgctgcggcgcgttttgcgattcccggttatgagctggtgtataccgcaccggtagaaaccgcgctgcaggccgacgacctgcgcaacaccgccgaggtgtggcgcgagatgttcgacgcggcgaaaacccgcatcgatctggggcagttctacgtggcgaatcaggacggctccttgctggacggcgtgctgcagcgcctgaaggcggccggtgagcgtggggtgaaaatccgcttcctgctggaggagaaaggcatccgcaactccaccgccgagacgctggagcagctgaaggcgatccccaatctggagctgcgcatcattccttaccagaagctgagcggcggcatcctgcacgccaagtatctgctggtggacggcgaacaggcgtttgtcggcagccagaacttcgactggcgcgcgctggagcatattcacgaaaccgggctgcgcatcagcgacgccagggtggtggggcaaattcaggcgatcttcgaacaggactggcgggcgcaggcgctgctggcgcaggataagccggtgccggcgctgcccgattcgccgccgaccgcgcccccgcaggacaactatctggtggccagcccgcgcgcctacaatccggcgggcgtgctcgattcgcaggccgagctgccgcgcctgctggccgacgccaaacggcgggggcgggggcaggggatggactacgcgccgctgtcgtttggcccggagcgcagccgccccttctacgcggtgatcgacaatgcgctgcgcagcgcggcggcgcgcggcgtgcagatcgagctgatggtggccaactggaacaccaaaaagccggatatcgcctggctgaagagcctggcgctggtgccgaacgtgcagatcaaggtggtgaccattccgccggccagcagcggcttcatcccgtttgcccgcgtgatccacagcaagctgatgaccatcgatgatgagattgcctgggtgggcaccagcaactggaccggcggctatctggacaactcgcgcaatctggagctggtgctgcacagcgcggcgatgagcgggcggttggaccagctgtatcaacagctgtgggacagcgtctacgccgagccgttgaagctggattacgattacccgacgcccaagccgggcggcggatcctgataagcagggcgcggttaatccccgcgccccgtttttttatcgccgccagccggccttctccagcgccgtcaccagctgctcggcgctcagcccttccgcccgatggccgttgccgctgacgctattggccgccagcagcgcattgacgatcgcctcttccaccgcttccgccgccgccgcgaacagcgccgaaatgtagtcgttgttcaccatgcgcagcggcgtggtgaaatcgcctttattggcgtagtcggcgggcggcaggccgtcgttgccggtggcgaaggcgataaagatatcgccgctcgaatcctcggtgccgccgccggtgcgggcgatgccgatgctggcgcgctgcgccagccgcgcgcactggtgcggcagcagtggcgcgtcggtggccagcgccaccacgatggagcccatgccgggatgcggcaactgcggcgtgaacggcgaggggatatgccccaggtggcggcccaccggataaccgcccaccagcagcgactcgcgcttgccgtggttggcctgcacgatggcgcccaccgtccagccgccctgatcggcgggcaagcggcgcgatgcggtgccgctgccgcccttgaactcatggcagatcatgccgctgccgccgccgaccgcgccttcctgcggcaagccgccacgggctgcctgctgcgcctggcgcacgtgctcggccttgacgtgaaagccgttgatgtcgttgagcagaccatcgaaggtttccatcaccaccggcatattccagtacaccgcgttgtcgctcgcgggcagcgcttcgcgttccagcgcgatcagcgcatcgcgcactacccccacgctgtgggtgttggtgaaggcgatcgggctggtcagcagccccgcttcacgcacccattccaggccggtggcgtcgccgttgccgttcagcacgtgcacgccggcaaagcagggggcgtggcgggcggagccggggcgcggttcgatcaccgtcacgccggtgcgcacgctgcgcccgtccgccaaatcggcatgaaggctggcatggccgacgcgcacgccgggcacgtcggtgatggcgttcagcgggccgggcgtgccctggccgatggtgatgcccagatcctgagcgcgctgcgtcatggttattctccttctattgagggggcggcgaggggcgccgtctggcggccgcgcagatggttcagcgccagcccgaagccgatgatgccggcaatgataataaagtctttcaggctgctggcgatcaaaatcgtccacagcacgtacaggcagcacagcagcgccgccagcaccggcagcggccacagcggcatcaggtacgggtgatggaagtggcggcgacggcggctgatcagcgccgccaccgccatgatgatgtacaccagcagcagcaggatcacggtgaacgaggtcagcgattcgagatcggagcaaaacgccagcagcgccgagggcacgccgaacagcagggtggcgatccagggggtgccgaaacgcgggtggatgattttcagcgcgcggttgaacgccggcagccagaagccgtcgcgcccgctggcgaacatcatgcggctgaactgcgccacgatggcgataatggcgttgaacaccgacagataaatcgcgccgctcaccacccgcgccagcgtcgggccgccgagctgggtgaccacatagccgaccgggtcggcctgtttggccatctccgccagcgacggcgagccgatcagcagggcggtgaacggcaccagctccaccagcaccacgatgaccagcgtcagcatgatcgcgaccgccatcggtttgccctgttcgcgcatgtcttccgccatgtacaccgctgcgccgtagccgttgtaggagaacagagcgaccccgaccatggcgacgatcagcggcagcgacaccggcgccaggctgccttgcgcgtccagcatcaccggcgcggtgaggatctctgcgctttgatgcggatggctgaaaccgagccaggcgatcagcgccagcaccgccacttccaccaccagaaaggcgccggtcagcagggcgttggccttgatgttgaaaatggcgcaggcgccgccgatcagcacggtgatcatgccggcggtggaggcgtcgaatgaggtgcccagcgcggtattcagatagggcacggcgccggtggccagcaccgccggcacgaacagcgcggcgctgagaataaacagataggtctgcaacccgcacagggtgccgaacaggcgtttgatgatgctgtattcgccgccggcgctggggtgcgcggcgccgagctcggcatagcacagcgcgatggtggcggcgacgcaggcggcgatcagaaatgacagaaaggcgccgctgccggcgctggcgatcgccagcggcgcgatgacgaagatcgaactggccggcgtcacgccggacgcggtaatcatcaccacgtcgaggacgctgagattgcctttgaaggtgtgttcaggggcggactcttgcatggttaacgactccattaacgtgtgagtgagtaattgttttgctgcacaggctgtacgcagaaatcaaatggagcgcgcgaaatgccggggagcgttgctccccggaagtttattgttcttatgtgttacccctgccccgacgggaagctgaagctggcgcggcgggcgtcgccggaggccggccagcgctgggtcacggttttgcgtttggtgtagaacctgacggcgtccgggccgtaggcgtgcagatcgccaaacagcgagcgcttccagccgccgaacgagtggtaggccaccggcaccggcagcgccacgttgatccccaccatgccgacctgaatgcggctggagaagtagcgcgccgcttcgccgtcgcgggtgaacaggcaggtgccgttgccgtattcgtgggcgtcgatcaaggccatcgcctcctgcagcgacgccgcgcgtaccacgccgagcaccgggccgaagatctcttcctgatagatgcgcatgccgggcgtcacgcggtcgaacagcgttgggccgaggaaatacccctggctggggcggccgtcggcgccgatcacgcacagttcgcggccgtccaccagcagctcggcgccttcggccacgccctgatcgatatagcctttcaccttctgataatgctgttgagtcaccagcggccccatgtcgttgcggttgtcgctgccggggccgacgcgcatggcggccatctgttgccgcagcccggcgatcagcgcgtcggcggtgccgtcgcccaccgcgaccaccagcggaatggccatgcagcgctggccgcaggagccgaacgccgcgcccatcagcgcgccgaccgcgccggggatatcggcgtccggcagcaccaccgcgtggtttttggcgccgcccagcgcctgcacccgtttgttctggccgcagccggtgtgatagatgtgttccgcgaccggcgtcgaaccgacgaagcttatcgccttcacgcgcccgtcatgcagcagcgtctccaccgcttcgcgatcgccgttgaccacgttgagcacgcccggcggcagcccggcctccgccgccagccgcgcgatatacagcgcggcggagggcacgcgctcggaaggcttcagcacgaaggtattgccgcaggccaccgccatcggccacatccacagcggcaccatcgccgggaagttgaacggcgtgatgcctgccaccaccccgagcggttgaaactcgctccagctgtcgatgcccggacccgcctctttgctgtgttcgcctttcagcagttccggcacatagccggcgtattcgatattctcgatgccgcgctgcagttcgcccagggcgtcgctgagcaccttgccgtgctcggcggtgatcaactggcagacggcgtcggcgtgctgctccagcagatccttgagcttcatcatgatgcgcgcgcgcttcagcggcggggtgtcgcgccaggcgggataggcctgttcggcggcggcgatggcgcgctccaccgtggcgcggtcggccagctgcacctcctgcgcagattggccggtggccgggtcgtaaaccggctggctgcgttcgccgccggtggcgggctcgccgttgatccaatgggtgatggtcatgattctctccttattcggtggcgttgagggcgtcgccgacggcgttgatcagcgcgtcgatttgcgcttcgctgctgatgaacggcggcgccagctgcagggtgtcgccgccgtagcgcacgtaaaatccgctttcccagcagcgcatcgccgcctcgaaggggcgccgcgccggttcgccgggccgcgccgccagcgtgatgccggccgccaggccgatattgcgaatgtcggcgacgtgtttggctccttgcaggctgtgcaccgcgcgctcgaaatagggcgccagcgcctgcacgcgctccaccatctgttcacgctgcaggatgtccagcgtcgccagcgcgaccgcgcagctgaccggatgggcggagtaggtgtagccgtgcgggaattcgagctggtagtccggctcgccgccgttcatgaaggtgcggtagatctccggccgcaccaccaccgcgcccatcggttgcgcgccgttggtcacctgtttggcgatgttcatgatgtccggcgtgacgccgaacgcctcagcgccggtcatcgcgccgcagcggccgaaggcggtgatcacttcgtcgaagatcagcagaatgtcatgctgggtgcagatctcgcgcaggcgctgcagatagccgaccggcggcacgatcaccccggcggagccggagaacggttcgacgatcaccgcggcgatcgtcgaggcgtcgcgcagcgcgatgatgcggctgagctcatccgccagctccaccccctgttgcggcatgccgcgcgaaaaggcgttgccggccagcagggtgtgcggcaggtgatccgcctcggcgccggcgccgaacgccttgcggttgccggcgatgccgccgaccgagatgccgccgaagttaacgccgtggtagcccttttcccggccgataaagcaggttttgcccgcctggcctttggcgcgccagtaagcgcgcgccattttcagcgaggtgtccgccgcttccgagccggagccggtgaaaaatacgtaatccagccccgctggcgtcagcgccttgatctggttggccagctcgaacgacagcgggtggccgaactgaaacgccggcgagtaatccagcgtcgccagctggcgctgggcggcgtcggtgatttcctgccggccgtgccccaatccgcagcaccacaatccggacaggccatcgaaaatctttctgccgtcgtggctggtgtaatacgcccctgcggcctgagtaatgatgcgcggctgcgctttaaaattgcggttgccggtaaaaggcatccaatgggcttctaaccctgcggcatcgagacgattaagcgaataattttcagcggccatgttttcctccgggcaggaaaataagtgcgattaattaaataaaatgagttgttaacgaattgttgtgcgaaattgactatgtaccgcttgttctctactgtgaataatcatatgtcgaaacttacttaaggttttatgcaagtaaaaaagcgcgcgttgctgggacaattgtcggatatggatctgcgtttgctgcgggtattcaaggccgtggtcgactgcggcggcatgagcgccgccgaactggagctgaacatcagcctgtcgaccatcagcaagcacatcaaggatctggagcagcggctgggcctgacgctgtgccagcgcgggcgcgagggctttgcggtcaccgacgaggggctgattatctaccaggaaaccgtcaacctgctggcggccaccgaggccttccgtcgcggagtggacgaggtgcaccagcgcatgggcgggcagctgcacgtggcgatattcgaccatacggtcagcaatccgcaggcgcagatcggccgggccatcgcgttattcagcgagcgcgcgccggaggtttctttgcaaatgtatgtggagccgattaataccattgaacgcggcgttattgacgggcaatttcaggttggggttattcccatgcaccgcagcgcggaaagtttatcttatcattcgttattcagtgagaggatgttcttatattgcggcgcgcagcatgaattattttccggcccccatgaaacattaaattgggatctgctgcacaattatgccttcgccggattaggctatcattcgccgaatatggaactgagcctgcagcaacatttgcatcgcaaggcgacggggtttgcgcaggagtcgatagcgacgttaattctgtccggcaaatacgtcggctttctgccggatcactacgcggcgttttttgtggcgcagaacctgatgcgggcgatcaaaccggcgctgttccgctatcactgcgaatactccagcgtgctgcgccgctcgccggtgccgcagcgggtggtgaagctgttccatgagtgcctgctggcggcccacggaacagcgtgacgcttactgctctttcttcttgccgaagattctgatcagcgcgccgaccaggatgccgaccgcgatgccggcgaagatccagccgatgatgcccatttccttactcctgctagtgcgttggtctgattatacccgtcatacttgaaactgcatctgtgttggctgcgagtgcgtacgccagtcacttacttgagtaagctcctggcgagccgcctcttgccgccgggatgcagctccaactatttagggtagatatcatcattcgacgcgaaacgcctcttcgatcatccgttgccgctgcgccggcgcatagtcgatccaggaattcttgctgttggatttctccagcgccaccgccaattcctggccggaaatcggcaaatcgtcctgccagaatggcgcgatggcgtggcgggtgatgaaatcggtcaggtagctctccgggctgccctgccagtgcgggtacaggcgcgcggccagctcggccatcagcgcgcgctgctgcggctgttcgctgctttccagcagggtgaggaacggcagcagcaggcggccgcagacctggccgtgatggtagtcgcgcagcgcgccgatctcgccggcgatgccgtgaatgacccccagcccggcggcgctcagcgttagccccccgaggtacgaagcctgcataatcgcttcgcgcgccgcgtcgctgcggttgagcgccggccaggcagcgaggaagtggcggatgccgctcagcgacatatcgcgcgtcatggcgccggcggttttcgacagataggcctcgaacaggtgggtgaaggcgtcgatggcgcagtaggccagcaccttgtccggcgcgccggccagcagctgcggatcgagaatggcggtgtgcggcacgaagttattatggcgcagcgaggctttcactttgctgacctgggtatcggtgatcaccgcgttctgcgtcacctcgctgccggtgccggcggtggtgggaatggcgatcagcggcagggtggcgctgctgattttgctgtcgcccaccttttccatatagcgcagcgtcggcagcgggtgctccaccagcgcggagaacgccttggcggcgtccagcacgctgccgccgccgatggccaccacgcgccgcgcctggccgcgccagcgcgccacccaggcgtctatttcctgcggcgacgcctcgtggctgacgatctcagtgccgatgagcagcggcgtcagcgcttcgcgcaggccggcgtacacggggccgttgagaaaagagcggcagctgaacagcagcgtcggctgcggatcggccagcagcagcggcggcagctgctggatgctgccgtggccgaaccaggtctggcggttggcgatgatatggctgacggacatgaggtctccttgacggcgttgcggggcgcgatgccacagcataagccagcgggcgcggagcggccaccgctttccccgccgcggcaacctgtgagttgtttaacatgtaaacgatgtcgttcttgcatttcggcgcgccggatgctttttttaacagtaccggccgtagtacggccaacaccatccgaaatcggtagattgttaatgtattaataatggcgaggcgggtatggatattcaggttgaacgcttgtctgcggtgatcgatgcggtggccagcccgcgtttttatcccagcctgctgaactggctggaagggtttttcgccttcgacaacgccatcgtctatgccttcgaacgcggccggccgccgcgctgcctgatcaaaaccgagcgggaaaacagcgacgcggtcaaccagatctaccagcagggcgcctacctgcaggatccgttttaccgcgcgctgaacgacggcggcgaaggcgaggtgctgacgctgcgccagctggcgccctgtgggttttatcacagcgactattaccgtaacttttatcgcaagaccggctggcacgacgaggccggcgtgctgctgcaattgacgccggagcgcgggctgggggtatttttcggctcggcgcgccgcacggtggcggtgcgttacccgcagcgggcggatctgcgcagcgcgctgacgctggtaaaaagcgtggcgcggctgcacggcgaagtggtggcggcaccggccgaggccgacacggagaaccacgacggcgcgcaggcgcgctatctgttgacgccgcgcgagcgcgagatcgtcgatctgatcctcgccggctgcggttcgcagcagatcgccgaccggctgttcatcagcctcggcacggtaaaaaatcaccgcaagaacatctacggcaagctgaacatcggctcgcaggccgaactgttcagcctgctgctgaccgccccgcagcggcgcagcgcgtgaatgttaattttttgtagcgaatgtccctaaggggacatagcggcacggctgctgcctcccgataatccgatgtcatggcataggcaatcgggagtgcgacagtgaacaacgaaatcgagtccttaacctactacgcggcgaccaaaaaatacgatctgcgcttcccgacgctggaagaggatctggacgtcgacgtggtgatcatcggcggcggcttctccggtatcaacaccgcgctggagctggcggagaagggcatcaccaacatcgccatcctcgaaggccgctatctgggctacggcggcaccgggcgcaacggcggccaggtgatggccggcatcggccacgatctggagaagatcaaacgccacgtcggcccggccgggctggaaaccatcttcaagatcagcaacctcggcgccggcattatccgcgagcgcatcaagaaatatgacatcgacgccgacttctgcttcggctacggctatctcggcagcaacgcgcgtcaggagaagaccctgcgcggctggctgaaggagttcagggcggtggcgccggaagaggagatcgagctttacaccggggcggaggtgaagcaggtggtgggctccgacgcctacacctgcgcgctgaaacacatgggcggcggccacgtgcattcgctcaacctgttgctgggcgaggccaaggcgctgagcggctacggggtgaaaatcttcgagaacagcagcgtgctcaacgtggagtacgggccgcgcatcacggtgcgcaccgccatgggctcggtgcgcgccaacaagatgctgtgggcctgcaacggcttcctcaacggcatggaaccgcagatctaccgcaagactatcaatacctacgccttccagctggccaccgagccgctgtctgacgatctgatccgtcagatcagtccgatccgcggcgcctacagcgacattcgcccggtgatcgactattaccgggtaaccaacgaaaaccggctgctgttcggcagcgccactcgcctgatcgaatatttcccgtcggatctcaaggcctggaaccgcaacctgatgctgaaggtgttcccgtacctgaaagacgtgaagatcgatctggcctggggcggcccgctgtgctgcagcgccaacctgttcccgcagatcggcacgctgccggatcgcgacaacgtgttttacgtgcagggctactccggcttcggcgtgacgccgagccacatcgtgtgcaaggtgctggcggagggcatgagcgaaggatccgatcgctacgatctgatgagctcgatcccgcacgtcaacatcttcggcaaagacaagctgcggcgagtgatgaccaccgccggtaaggtttggcaccagacatccggctactggaaaggccgccgttaaccctcagaggagaatgacatgaaaccgttactgcttaaacaaccgctgccggaactgctggagatcggcagcgtcagcaacctgggcgccacggtgatcgccggcacgccaaacgtcggcgtggccagcatcttcggcgaaccgaccgacaacctgaactgcggcgtgttcagctgcacccgcggcagcttcgtgatggagtacccgttcgccgagcacgccacggtgtgggaaggcagcgccaccctgaccaacgaacgcaccggcgaatcggtgcagtatcaggccggcgattcctggttcgtcgagaagggcaccccggtgcgctgggacatcacctcggatcgcttcgtcaaacactacctcgccatcgtcgagggctgacgccgtcatgcccccctcagcaggctgaatgccgagggggagcaccttaacctaacgcccgcgcaataaagtcggttacccgcttgaggatctgatccttattggtttcgttaaagctctcgtgccgcccgcccgtgttgatcatccgttcgaaatcgtcgccccgcaggcgatcgagcgcggtttgcgtttcgctcatcagtaccagccggtcgtcgtcgccgtggatccacagagtaggcagcgcgccgaaccccggcccggcgttgatggcggcgaggatccgctgcatggcgcgcagagtggggcgtttgaacggcccgtgccacaccagcggatcctcctgataggccgcgccaaccgccggatcgcgcgccagggtggcggtatccagcggcgcgtcggggatcgtcggcaactcggccagatcggaaatcgccgttctgtcgccgagcagcgggccggacagcaccaatgcgcgcacctcctcgccataacgctgcacgtagcgggtggcgatcatgccgcccatcgagtggccgatcaccaccagcggcagcgtcggatactgttggcgaagatgctcgaccacgcgctgaacgtcgtcgaccacggcgtcataatcctcgatcagcacgcgctcgccctgcgacagaccgtggccgagatggtcggggccgaatacccgcgccccctgtgcctgtagcgtgcgcgccacgtattgatagcggccgagatgctcgccgtagccgtgtaccagcagcgccagatagcgcggcttgtcgtttccccagtcgtgcacggcgatgtcgccgtgacggcctttgataaagctgacggtttgttcggacatgttattgttctcatggtggtagggttgcccttcagcgtagcggctggcggcgagcttgtcaggggcgccggatgcggcgcccgcagagaggggattacaggccgaactggcgcgccagttcgtcgagcgcttcgcgctggaagcggttgaacgcgtcgcgcggctgctgttgctggatgaactctagcagcggatcctgcacttccgtgcgcacgccgctcagctgctccatcaccgccagcccgcagaacggcacgtaggattcggcgtagccgccttcatgcaccatcaccagcttgccgccgcacagccggtcggcggcgtcttgcaccagcgcggtcatggcgcggaagctgtcgctgtgcagctgcatgcgcgccagcggatcgagcgcgttggcatcgtagccgcaggcgacgatgatcagctccggctcgaatttttccagcgacgggataatgatgcgccgcatcgcgtgcaggtagccgtcgtcgccggcgccggccagcatcggcacgttgacattgcagcctgccccggcgccttcgccgcgatcctgttcgccggaatagcccgccgggaagcagccgtcctgatgcagcgacagcgtcagcacgtcgccgcgctgccaatagatatgctgggtgccgttgccgtggtgcacgtcccagtcgagcaccgccaccttgcccaggccgtagcgggccttggcgcgctcgatggcgatgggaatattggccaggaagcagaagcccatcgattgatccggcaggcagtggtggcccggcgggcgcgacagcgcataggcgttatccagctcgccctgcagcaccgcctccaccgccgcgcaggccagtccggcggagagtttggcgatttcatagctgcccggccccagctgcgcctcctcccccagcaggccgccgccgctgtcgctcacctgtttgaagcgctgcaggtagtgggcgggatggatgcgcagcaggtcttcttccgtcgccggttcggcgctcagcagggtgagttggcgcgacaggccggacacgtccatcagattcttcatgcgccgcttggtttccggcgattcggcgtggccggcgcccgaaggcggttgcacccagccgccgaccggcagggtggtggcgtgcaggccggtgctgtgccagaaacagcgttcatcaaacaagaaaccggttgttcttttcacctttctcctcctgttatacggcgcggtgcgcgcggtgaagccagcgaaatcaacagcagcgacagcagcgcgcagcccagcgcgccgaacagcaaggcgttgaaaccgccggaatattcgattaaagagccggccagcgtcgggccgatggccataccgccgccgatcaccaagttgatgccgttcatcagcttgccgtcgttatccagcccggcgacccgcgccagaatgaatggcagcacgaaggtccaggtgaatttgaacagcagggccgccagggcgaagcgcagcagcaggggttggcctgtcagcagcgccacgctggccagcagcagggcgtaccccagtacgatcaggcgcccgccgctgaagcgcgcgccgatcagcgccgcggcgccggcgccgacgatgccgagcaaggtggcgacggccagcacctggccgctgtgggccggcgacagcccggcgccggcggcgatgccgccgataaaggtccagaccgcgctcaggctgatgtaaaaggtcagcaccgccagcacggcgcacagcttgcgcgccagcgaggcggcggggccgctgcgggcggcgcgggcggcggtaaaaccgttggggaacgccgggatgagcggcaggcagcacagcatgatggccgccaaaatcaggtagaccgccatcagaccgaagtgcgcgaacagcggcggcagcaccagcagcccgaccgcgcccagcaccagctggccgagcacccagaaggcatacacccggctggggttggcggtgccggcggcgcaggtgatgcacaggatcatcagggtgccgcccgccagcgaggcgataaagcgcagcggcagcagcagggtgaaatcctgcaccagcgccgaagccaggttgccggcgataaacaccagcgccgacagcgtagcgacccgccgccagttgatgcgcccgatccaccaccacgccggcagcgtggccaggctcatggcgccgagttcggtggagaacaggtggccgatctgcgccgggccgagttgccactgagtcgcgagctgggcggccacggcgggggcggtcatcagaatgcccggcgcaatggcggcgaagacgataatggcggtcagcagccgcggcgggcaggggagcgccgcgccgacggcgggcgcggaaaccgaatcactggacataaaccttttccccaagcgttgagtaacgatgaaatatcccgcccggcccgattgcgggcagggggaagccgcgccataaatggcgaatatgttctggcgttattttccggccgccggcagcggcggccgttatcgggcgttaaccgtgagcgagaaaaccgccggcgaccagttcggtgcggttcaccacgtcggttttggcgaaaatattgcgcatatgggttttcaccgtagacagcgaaatgcccagcttcagggcgatgcgcttattgctggcgccttcgcgcaccatgttgacgatctcttgctctttggcggtcagaagctgcgcctcgctgtcgggcagcagatcgcgcgtcgccagctcgatcagcggcagtaccgcgcgcaggcggccgcgctccacttcggtaaacggcgtatcgcggatcagcgacacaccggcaacgatgcgcttacgctggcgaataaaaatctccgtcatgtcgcgcatgtcgttcggcagcataaagtcgtggtaatagcggcggttgccggcgatcgccgccgggctcatgccgaccatggtgatgtcttgccgatggaaattggccggctgcagcgggtcaatttgctggaagtggttcagatactgctgatgcgttttatcgggcatgccgtgcaggatgtagtgatccggccgcaggtcgcgatcgaccagataaaacaccccggcagacaccgggatcaggtgcgtaatggtcgccaaacagctgttgataaaggcatcggatgcggtgctgtgcatgattcgtgttcctccctttatcgttcaatctggagaaggttggcggtcaatatatgaacgatacaagcatagttgtagcaatttggcaacacaataaaaacatattaacaacgtgaggctgattgcaataaaatacataaataacaagatgacactgcgttaatcagggctttttcgttcggatttatcgcgattttcattaataggttaatgaaataattcaccgcttttcccgctgaatttacagcgcttttcaatgcttgcctgggtcaagctttcgccgccctgcgcgtgctacagccgccgctgtcgtcgccgtccctcgttcttaagaacgatagccaggcttttccgccgctttctacactgcgaattgaagatagcgccaggcggcgccaaacgtataagacgaaaaaatgatgacctttctcgggctgaggcgtcgggttgttcagtccgcatgaccatacaggggacggacgatgcagaaaaaaacgttggcggtggcgttgagcggcgccttatcgggcctggctcagggggcggacgccgatcgccccaatgtgctgatcattctggtggacgacatgggctactccgacatcagcccgttcggcggcgagataccgacgcccaacctgcaggcgctggccgaacggggcgtgcgcatgagtcagtactacacctcgccgatgtcggcgccggcgcgttcgatgttgatgaccggcaacaccaatcagcaggccggcatgggcggcatgtggtggtatgagagcaccgccgcgcagccggggtatgaaatgcgcctgaccgaccgcgtgaccacgctgccggagcgttttcgcgacgcgggttacgccaccatgatggcgggcaaatggcacctgggctatgtcgacggcgccaaaccgaccgatcgcggctttgagcgcgccttcgcctttatgggcggcggcaccagccatttcgacgacgcgaaaccgctgggcaccgtggaggcgttccacacgttttacaccctgaacggcaaacgtgtgtcgttgcccaaagatttctattccagcaaggcctatgccgatcagctggaacagtggatccgtgatactccgcagaataagcccgtcttcgcctatctggcgtttaccgcgccgcacgatccgctgcaggcgccggatgactggatcgccaaattcgacggcaaatacgacgccggttaccagcaggcctatcagcggcgcattcagcgcctgaaggcgctgggattgatttccgatcgcacgccgatgccgacgctggcgctggataaggcctggaacgcgctgacgccggaacagcaaaaatatgaagccaagaccatgcaggtgtacgcggcgatgatcgcttatatggacgatcaggtcggcgcggtgctgaataccctcaagcagaccggccgcgaccaaaatacggtgatcgtgttcgccaccgacaacggcgccaacccggccagcggcttctactacggctcgaagccggagtattggcggcagttcgacaacagctacgccaacctcggccgcaagggatcgttcatctcctacgggccgcactgggccaacgtcagcaacgcgccgtacgccaactaccacaaaaccaccagcgcgcagggcggtatcaacaccgatttcatcatctccgcgccggggttgaagggccgcggcggcatcgatcgcacgccgatggcggtgtatgacatcgcgccgacgctgtatgactatgccggcatcgacgcccacaaaccgctgaaggccaaaccgacgctgccgatggtcggcgtcagcttcaagcgctatttcagcggcgaggccgacggcgtgccgcgcgcgacctacggcgtggagctgcataaccaggccgcctacgtggacggcgtctggaagctgcggcggttggtgaaggccgggccgacggcgcagatggcgccgtgggggctgttcaacctgcatgacgatccgctggagacgcgcgatctggccgccgccgacccggagcgggtcaaacggctgagcgaggcgtatcgccgctttgcgcagcagggcatggttattgaagccaaaggtgcagcgatcgactatctcggcgtcgacgccaacaccggcgactacattggcctggatccgcagacccacaaaccgttgccgcaggcggcgccatgaacctggcccagctgcgcacgcagcagatcccggtagagagcgaaccgcgcgcggcggcgccttttcacctgctggtgaaaccgatcggtgctggctgcaacctgggctgccgctactgctactacccgcagcgccagcaagcgcagacgcgcaagatggacgacgacctgctggcggagtttatccgcggctacatcgccgcccagccgcgctacagccgcgagatcaacttcgtctggcagggtggagagccgctgttggcggggatcggtttttacaagcgggcgctggcgttgcaacgccgctttgcgccgccgggcgtgcggatcagcaacagcctgcagaccaacggcaccctgctgaacgatgcctggtgccggctgttccggcagcatcaattcatcatcggcgtcagcctggacggcgatcgcgaggtgcaggacgcccatcggccggacaagcgcggcggcgccagctatgacgccgcgctgcgcggcatcgcgctgctgcagcgccatcagatcgacttcaacctgctgatggtggtgcacgacggcgtcgcggaccgcgccgaggcgatctacgatcatgcggtggcgatcggcgcgcgctatctgcagtttcagccgctgatgctggaaggggatgcgcccaccgccggctatgggctgagtgccgccaactgggggcgcttcatgctggcggtataccgccgctggcgcagccgcgggcacgtcggccaggtcttcgtgatgaacattgagcaggtctacgcgcagtatttcacccacgtcagccccagctgcgtgcacgccgaacgctgcggcggcaatctggtgatggagccggacggtcgcctctacgcctgcgatcatcttatcaacgcgcagcacctgctcggccatgccgatcggcagacgccgctcgccaccctggcggcaagggcggcggagatgccgttcggcaagaacaaaagcctgcgccgcgagtgccaacgctgcagcgtgaaaagtgtctgccagggcggctgcccggcgcatgtgggtgaagatcgctacaaccggttgtgcgccggctattacgccttcttttccgcgctgctggcgccgctgcgcgcctacccgcgcagcccgcagggagcgatgcagtggcgcgccgccgtgagcgcggccgcaggttgaaagcgtctcgtccttaaggacgatagtcagcattttcctttcctctctatagtgagatgaccgccgctggcggtgaaaaacctgcaagcacctgcatgcatcaggccaaaactataagaggaaataaccatgaacctgtcgtcgcggttgcacgcccacctggctcgaggcaaggtcggctttcccaccaccctggccagttcggtcggggtgatcatggccagcccggtgatcctgacggtcaccagcggcttcggcatcggcggcgacaccttcgcgctggcgatgctgatcgccttcatcatgatgcaggcgcagctcaccactttctccgaagcggcggcgctgctgccgacttccggttcggtttacgactacatctcctgcggcatggggcgctttttcgccatcaccggcgcgctgtcggcctacctgatcgtgcacatcttcgccggcaccgccgagaccattctctccggcatcatggcgctggtgaacttcgagcacctcaacaccctgatggaaagccacaacgcctcctggatggtcggcgtcgggctggtcgtcgtgttcggcctgctcaatgcgttcggcatcgaggccttcggcaaggcggagatcgtgctgaccttcgccatgtggagcacgctggtgattttcggcatcgtcgggctgctgtcgccgcatgcggtgccgctcgagggctggttcggcagcacgctcgatctgaacgatcccttcgcggtgttcagcctgatcggcatggcgatgttcatgttcgtcggctgtgagctggtgacgccgatggcgccggagatcaaacgctgcgatcgggtgatcccgcgggcgatggcgctcgggctgtgcggcgtggcggtgtgcatggcgctgtacggcgcggcgctcagccaccaggtggaaaacgtggtgatcgacgccgccagcggcacgcgtctgctggaaacgccgatggccatcccggcgttcgccggccaggtgatgggccagttcggcaaatactggctgggcgtcggcctgctgctggcgggcgcagcgaccatcaacacgctgatggcggcggtgccgcgcattctgtacggcatggcgctggatggcgcgctgccgcgcatgttcgcctatctgcacccgcgctttaagacgccggtggtcggcattctggtggcggtcctgatcccctgcgtacatgccttcgccattcagggcaacctcgacaggatcattccgctggtgctggcggcggtgtgcgcctggggcgtggcctacctgctggtgacctgctcggtggtgatcctgcgcctgcgccgccccgatctgccgcgcgcctataaatcgccgtggttcccgctgccgcagatcgtctccagcgtcggcatcgtgctggccatcgtctacatcacgccgccggggatgaacccgcgcgacgtctatattcccttcggctggatgatcggcctgaccgccgcctatgcgctgttctggacgctgtgcgtgcagaaagtgaatccgttcaagccggtgccggtcgagcaggtgctggagaacgcgttcgccaagggcgaaaacgaggaggcgcagtttgatcggcttacttccctcacttaatcgcgcctggcggcgagcgccgtcgggctatcggccgggcgccgcgctggatcgtctggcgcgtaacctggaaccctacgcgtgcgaacgcctggcgccgggcctgctgcggctgacgctgccgcaggggccgcagatcgaggtcagcgaacaggtgcaggggctgtttatggcgcatatcgtcagccaccgttttcggctgcagggagtatgcgcagcgcagcccccgctgacgctggatgtggtgaccggcggctggctgcggcggcgcggggtgcgttatctgttgcgccagcgccatgcggccgcgcagcgggtgctggaaggcctgcagcgctacccgcagatcggcgagacgctggcgcagctggattttcgccgcgtgcggctgacggtgaacgacgggcgctggcaggtggatatcgagcatttcgccgcatcggaggtggtcagccgtttgccggccggccgccgctatctgcggctggatgctgaacagcggcggctgccgttgagcagcctgctgatgatcggccaactgatggagaagctgaatcatgaatagagtggttgtgattaccggcggcggcaccggcgtcggcgccgcctgcgcccgtctgctggcggcgcagggcgatcgggtgttcatcatcggccgccgcccggaaccgctggcggcgctggcgcatgagatcggcgcgcaggcgctggtgggtgacgccgccagcggcgagagctgggcccacacgttgctgccggccattctgcgcgacgccgggcgcatcgactgcctgattggcagcgccggtggcatgggcttcaagcgtattaccgagatgaccgacgcgcagtggcaaggggcgatggacagcaacctcaacagcgctttcgccagcgcgcgcgcctgcctgccggaactgatcaagagcggcggcaacctgctgttcgtcgcctcgatcgcctcgctggccgccgggccggaggtctgcggttatgtcaccgccaagcacgcgctgatcgggttgatgcgctccatcgcccgtgactatggcccgctgggcgtgcgcgccaacgcggtgtgccccggctgggtgaccacgccgatggcggacgaagagatgcagctgctgatggacgcccatcagatctcgctggagcaggcctaccagatggtctgccgtgacgtgccgctgcgccggccggccagcgccgaggagatcgcccgcgtctgccgtttcctctgttccagcgaggcttcaatcattaccggcgcggcgctggtggccgacggcggctccaccatcgtcgatgtgccgacattggctttcacttccctgtaaggagcatttccatgagttcagaagcggtattcattcaggttggcgcgctggcggaaggctttgcgccgcacagcaatacgctggaacgccagcacggcctggcgggcaccacgctgacgctgcgtttcagcgacggcgcgacgcagcgctgtcggtttaccgacgagcagacgctggagtggggagagcggcgcggcgtcgcctatcgcgccaccagcattcgccccggcgtgctgttcatcgattttctcgatcccgcccgcgccaacgccagcattacgctggtatgcgaccgcaatcagggcaactttaccgcggtatacggccagctgccggacgaagcgcaggcgcggctcgacgccttcagccgggtggaacaggggctgccgctgaccgcggtcgaggccgaattccgcttcggcacgctggatgacgccgacgtggcgccgccgggttttaccgatgagctgatcggcatgcgcaacatgtacacctacagcccgaccgaacgttacgagcacatctacctgaacgacaacttctatgcctggcagtgtctggacggggtggagaaagggctggcggacgtcgaccgctgccactacgtgaaggtggcggagcagctttatctgtttgtctggcgcgagaagatcattccgacgctgggcgtggtgatgatcgatctgcagggcatgcgcaccgacggcaagatcctcggttatcagggcagcgatttcagcgcgctgagcaactttgcggtgggcgcccacgcgcaggtgctcaacaccacgcgccacccgcgaggataggccgatgagcgcaacctatgcggccgacgccttcgccgggcaggcggtgctggtgaccggcggcgcgcagggcatcgggctggcgatcgtcagcgcctttgcccggctgggcgccgaggtgacgatcgcggacgtgcagctgccgcaggcgcaggcggcggcgcaaatgctgcgggacgaagggctgagcgtgcaggcgctggcctgcgatctggccgagccggggcagatcgccgagctggtggcggcggtgggcgagcggcatcaacggctggacgtggtgatccacaacgcagcttactttccgctgacgccgttcgccgccatcgacgcggccctgctgcaacgcacgctgagcgttaatctgatggcgccgttctttctggcgcaggcggcgctgccgtggatgcgccgcgccggcggcggcagcctgctggtgacctcgtcggtgaccggcccgcgggtggcgtatccggggctggcgcattacgccgcctccaaggccggggtaaacggctttattcgcgcggcggcgctggagctggcggcggagaacattcgcgtcaacggcgtggagccggggatgatccgcacgccggcgatggccaacctgggcgacgcgcaggtgaatcaggcgatcgccgccgcggtgccgctcgggcggctgggggaaccggaagacatcgccgcggcgatggtgtttctcgcctcgccggcggcggcctacatcaccggccagacgctggtggtggacggcggcgcgctgttgccggaaacgaatgctcaccgctgattttgatctcatcagcgggagttttaccgcatgcgcgattgattgattgatagacagttgtttgctcaagctggaggtttgggcagaagcgcttaccggctccgcgggacgtttccttaaccaagtgccccattaagatgcaaccggttattgatgtatatagccggttgcgtatgaagcagatgtcagcctttactcttctcggcacaggtaggttggatacttcctgtcctgaatcaaccacaccgacggagccacctcagaaatagtcagatagtaacgagttccacgccgggcaaaatcgccccacacgttgtctggcgtattatcgttatgtcgccgtagcgtcttcgtgtaggtcagctcgatgattcccgcatcattgcgcggcctccaggtaaaattcacatcgcgatccaccatcgtcgccagctctcgggtagaggctgcccctttgtaggtggtgattccggttccgtcgcgatgaaagtaaaactgggtcatcacattcacttttacctcactgactttgcctgcatttcgggtaaaaataaacttagtggtacatgcaagcatatcttgcttctcagtcctggtatgggaaaggaaagttgccagtaatcccaccgtcacaacgccactgacgattaacagagctttaatcctcacttttcaaccccacttttataacgaattgttttacataggccctttttactttttgggcaggagccaataaaaatctcatctgcagaggtgagagggaagcgggcgctaaaataatagatgtcatacttgtcgcgctggcagtccaggttattctcactaagcagggaaggaagcttggataaaataatcggtttttcaggggtgcttatccaccagacagtacactgctcaaaattttcattcggtagcctcatgattcgcggaatattcatcgcatactctgaaagtaagtagctccctccgattaacgttgatacggctaatgccgcaatacagtaaggccggtgtgttgataaacgtaatctctctttccatgttttttttgttttcgttttcggtggaggaactggctcgatagcgacatttttatcgagatgcttctgtgctacgacatccgcatcaaaataaaaacccttgcctggtactgtcactattggcgatgtgtgaacgcccaacgactggaaggcttttcgaatctcgctgacagctttgttgaggttgttaccggatggcgtatagccaaaatcttgccacacccgggtaatcagcatgtctctgctgagctctttttctctatttctaatgaactccaataataatcgaacagcaggcgctgataactttaccgctgattcaggctggcctgccaggctgagtttttgtgtgtttgggtcaaatactaacgaattgcttaacataaagaacatataaaaacctctttttgggtttgtgatttttatttataccttatccggcagggtgggttctctatcgcccctttttgggttgttttttaatcagatcgatagtttaactaaatcatcataatcagtgtttttctttaactatttcgtataaatagtcagtaaatagagaaaaaaactgtgttttccaaatttcgcgatacaagtggtgatggtcatcctgcttagtataagatttttctcaaggtgtgaggacatgaaaagtgtgtctgaatgagaagaagaacattacgcatcattatgatgagcacaagaaggtgagatttgaaagataataaaacgctacccgggataagtagggttttggcccttttactattattctccttatttagcaacgttgctctggctaatatgagtgtttatccgatggagctgggtgtcgatgcttcagggaccgcgatcattaaagtggcatccaaaagtgatgatattcagttcgttcgggtgacgcaaaagagaattcttaacccaggtacgccgcatgaaaaagaggtggaaatcgcttcatggaaaaaggacggtctgatagtaacacctgccaaatttgcgcttgctgctggctcaatgcgcgttgtgcgcctggtatccctatcacctccgacaacggaaagtacatggcgggtttattttgaaggggtgaaacagcctgatgttttattgtccggagaaaataaaacccgctcagcagaagcgaagctaggggtgaatgttatctggggggctttggtgcatattgctccagagcggcctaaggtttcgctggaaattaatcctgcactcggagaagttataaatacaggaaacgtacgagttccgctaaaagaaattggtttttgccgtgccaatgcatcgtgcaaatggattaaagaagacgctactgtgtatccggggacgcaaagaaaattaaagtccctgagtgcaaatagtggtgcaacctacaagtttcgctactttaactggctgagtaaaaccagtgaagaggctgaattacccgtcgcaaaataacgtgacaaccgtaataaccacgcctgtggtttatttatagggcgaatgaagcccgcatgccaatatggagataacaatgcgtcattatattaaacctctgctgattgctaccgcgctggccacttctttcagctcgcttgccattcaaaaagatatcacagtcaatgcgagcgtcgattcccagctggatatgacccaggcggacaataccccgctgccggccagcatcgatatgcagtacctgccgggtcggggtctggaaagctatcgtttgaacacgaaagtatggtctaactccgccaccagtaacgtcaaagtccgtctggtcagcgccgcacagttaaccaatgcggatggcgatcagaatatacccctgacggtacaactgggtgaaaaggcgctcacgaccaccgacgccgaattcaccggtgccgagctgttccctgggacagtggaaaatggttctgcggtactgccgctcatcatttctcagaccaccaaaggtattttgaaaacgggccaatacagcggtgtagtcagcttgatgttgacccaggcgactaccgcggaaggcggtgcataaacaaggtagtgcgtttgtaagtcattaacatcagagggtctccaccctctgatgtcttcctgacatcagaggtttttttcatgtctctcccccgtaatattctcctttttgccgcattgttacctgcatccattcagcaagcctgcgcggagatggctattccggagggttttgaggagctggcgaaaaaccagcgcttatggattgaagtgacgctgtacggtgattctcttggcctgttcgaaacggacatgaatctggagaccgtgcgtttcatacagccggagagtctgctagacgctatcaaaaaacggtttaatgatgatcctcgcctgctatcagccatcaatgcggtgctggcggctccgatgcctcgcaacggcaatctggcctgtagcagcaacggcgaggcgcgtggctgtgggtatatcgagaccagcagtgcagcggtgatttacgatgaaaacaacgcgcgtatcagcttgtttctcgacaagcactatatgccgaagccttcggaagataagcagtggttccagcctacgcgtgaaaccgagactgcgctcgttcatcagcaaaatatcaactttgtcgccgatcgtgattatcaatcggtcaacgtgcagggcaacggtgcgctggcggtgacgcaggatggctatgtgaacgttgactggaactggctggggcaacgctcgcgtgagcagcacatgcaggatgtgacggtcaataacgcctggtttcgtcaggacttgtggcgcaaatactatgtccaactgggggagatggatacccgagatttgttcagcaacgccgggggcaatatcacgctcagccagttgcctatcggtaagatccgcggcatgcgtgccggttctacacgcgcctggataaacccggttcaacaatcgcaagggacgccggtcactgtatttttgtcgcacgacgcgcgcattgacgcccggcgaggtaatcaactgctgggcagtttttacctgaatgccggtgcccagacgctggatactcgcgcatttcccgagggcagttatacggtgacgctggctatttatgaaaataatcgtctgttgcgtaccgaagacgtcccgtttacgcgcacgggaatgaccccctttgaccgtgtggaatggtttctgcaagccggcgaaacggacaatgactcgcagcaggacccacgctcacccgtagctcaggccggtgtgcgcctgccgataaccgccaccctggcgttaaccagcggcgcgacagtgacccgacaacatcgatttgcggaaaacgccctcgactggtaccacggttttaacaccggccctgtcgacggcgtcctgagcactcgttttagttacctttatggcagcgagggggagcgcggcaacattcagcaggtgagctacaacgacggcttttcgctgagtttctaccgcaacgctctggcggcggaaaactgcgacaaccgtaatgcgggattttacggcgtcagcggttgttatcgatcgctgtcgctgatgttttccgttccggtaggaagctggtatgcctcactgggctactccgacaatcgtaatgaggggcgctatatcgcccgacgcgacttgccctccgacgataacggtcgtgacaacggcttgccttgggagcagatgtacatgacccgttcgcacgcccgctcatggcagggtggcctcagtaattcgttcagcaccaacggattgaacatcaacagcagcatcaacctgtttatgcgcagtgaaaatcattctgctgccagggataaaggcggctacctgagcgttagcctgtccctggctcgtccgcgccagggcgaaagctccggctatacctcgcttggcgctacctggcaacaacagcaacggcaggcgggaaccctcagctacaacgtggcgcataattggtacaccgatgctcgcggagaaaacgaatatggcgtgggcgcttccggtatcaatggcgactcgctgaatacctccgtctatacccgtcagggcgggcagtacggtaacggcagcctgacgctgagcgatagttgggatcgccaggcacgccaccacaccctcagtagcagcggcaactacagttcgactttcgcgctttcccgttccggactctggttcggccgctggggagacggacgcccggcatcggctatcggcgtggatgtctcggcgcccgacgatcggcaaagttcccgaattgccgtagcgctggacaacggagggagtgcagaggtggccgccaaccgccgcgcgttatttgccgtgccgggttaccagcaaaccacgctatcggtgagcgaatcactggacgtctcccacggcgccagcagcgaaatcacgcagggctccggcagccggacggtctttatggtgccgggcaatatgctgcgtcgcgaagttcgcacggtggccagctatacctggcttggtcaactgaccgacgagcggcatttgccgctgtcaggcagtgtgccgttgaacgtcattggctggaacgatctcggagatggaggattcagcgcgcagagcgaggcgccgatcgaggcgttgtatctggtacgaaatcaacagttctatcaatgcgcgctgcaggtcaaaagcacgcgcgacgtcgtgcgctacgtcggcacggtggcctgtcgcgagatgactttctcggcgctgccggacaacgttcagcgccgggcgcaattaatgatggccggccgtgcacagccttcgggccagaccgccatgaatcatcaggaaacgactgccacagggagttcacgtgaaacgtttaattagtctgttcgtgttgttgatcttgtggagcagtcatacgttggcgggggctccggccggcagaaataccagcgtcagcttcagcttcgatcggctgacgccgcctgcccgttttgacatctggcggcatgagccgggtggctatgatcctgccgatccgcaaaagtggggccgtaatgccctgacctgcctgtcgcgtaccggtgctactaatggcgcctgcatgacggcgccggtctggtttagcgccaatcctgcggcgccttatgcgataaccctgcgttttactcatgaactgagtaagaagaccgtggacgtaaaagtctatggtgaaaaacacatgttcataaataacaaagtctttacttttgccagttatgtgaccggcggcagcgcggatatcgcagcctggaatagcgagccctattttgacttttatatcgtcagaagcgagctggaaaaactcaatcagccggggatctggagcgccaccctgaaacagaacctgcgtcagtggggaagcgccgactgcggagggaattttaacgacgccaacgtgggctgccccggctacctgacgatcgccaactggcaggcgaatattcgcctggaggtgattgattcaagcaatcatcagatttatttacccgcttttcctcactccgcgccggtggtgaatctgaacctgactatgagcaatctgccggggcgcccaggcgggagcgaaatcaaggggcaatcttcgttggacatgtgcctgtatgacggcaataactccgccagcagccgcgtgatattgcgcttcaccgacgatggcgtggcggcggcagatcgcgcggccggtgcgttttctgtctggcggcgaggcggcagccaaaccagcgcacgcgaccgggtggattatcaggtctcagtgactaacccggtgaccggcgcgacagaaaccgccagcaacggaacggatatcgtctggcagggcacgaatgatcggagcattcttcgccaggtcgttttgccaggcgggagtgaaagcgtgctgtgcgtgccggcaccgatagtgctcacgacgccgacgtttgccgccgaaagtaaaacggcgggtgactataccggcacgctccacgtgatttataccccaagcaccctgtgaatgagagtcgcatcgtgaattacgccattttggacgacaatcacttctacgccgaaggccttagatatttaattttgcgcgaaggtgaaaatagccagattactacggatgatattcggtggcactggagactgctgacgatggatatcattgccgtgcgatgccgcttttcgctgacggcgagccaacagacattgctcgacattttatcgaggctggggaccggtcaatggaacggcagggtgtatctttgttgcaatgcacagagccgggccttggccatgcgtatgcgcaagcgatatatctcgttagagatccatcttctggacgacggtcaaagtctgcagaaaacggcccagctactggctcaagggccagcgctccccgccgttcagtgtctggatcccagtctcaccgatgctgaatttaccgtactgaatttattaactcgcggatttccagtacggcgcgtggccagaaccgcgcgcatgacggaaaaaatcgtttcacagcataaatgcaatgcgctgaaaaaactcaacgcccctaatttactcaggcttttgaatccggcatgacgtcaaggtaaaaacgtcagggaaatcgtgaactcatcgagggggcaaggattgccttgttgtctttggccccctctcaaaccccaccagcagcaatgcgtttcggcagcaattcgacccatggtgtcacttcttggcaggatgcgcggtgacgttggcgggcaggctgtcgcccagggtgatcagctcgtccagcaacgtcatcagctggtccattttctgccgcgagaaagcggcttcaatctcggcgtagccctgttccacctggtggcgcgccacttcatacagatcctgcccctgctgggtcagcgacacgtacagcttgcgctgatcgttgaccggcttgaggcggaagatcagtttgtcgcgctccatgcgcgacagaatgccggtcaggctggggcgcaggatacaggtttccgccgccagttcgtggaattcgatcgagcggctgttggccagcacgcggatgatgcgccactgctgctcggtgagattgtggcttttcaggatcgggcggaagaaccccatggcggtttcacgcgcctgcagcagggcgatggttaacgattcatgcataagtttggccttagctatcaaggtgttcgctgttacggcgctcgtcatgggggcgcctgccccgcaaagcccgatttgttaataacttaatagtagccaaagttacccgcagggataaagcaaaaatgcgtagcgcagcgaaaaatggcgagaaaaatgattaatacgttgaataatcacgccaatgtttgttgtttgtgaatattttgttatcacgatcacaaatcattccaagcgcgttgcgtaaaagctgcgcagcgtataaaagtaatcattaatatattaatgaatgccggttgtcatgttttgccattggaggagttcgcatgaaaggcaccgtattttccgttgcgctgaaccaccgcagccaactggacgcctgggatcaggcgtttcaccagccgccgtaccagaccccgcccaaaaccccggtgtggtttatcaaaccgcgcaatacccacctcgccaacggcggggcgatcccgtttccggccggtgaaaccgtgcagagcggcggcacgctggcggtgatcatcggcgacaccgcgcgcaaggtgccggcagcgcaggtgagccgttatctggccggttacgcgttggccaacgacgtcagcctgccggagagcagcttctatcgcccggcgatcaaggccaaatgccgcgacggcttctgcccgctgggggagatggggcagttggagaacgccgatcgactggagatcgtcaccgagatcaacggcgtggagcgggatcgctggtccaccgccgatctggtgcgctcggtgccggagctgatcgccgccatcagcgatttcatcaccctgcagccgggcgatgcggtgctgatcggcaccccgcaccagcggatagagatcaaaccgggggatgaggtgacggtgcgcgccgccggcctgcccacgttgagcaaccgcgtcactcaggcaggagccgcatcatgaaacatgcccgtattcgccatcatggccagatcgtcaacgttcaggtagacgaccagctgcgcgtcacgctgccaaacggcgaggtgctgcaggagcgtgaagtggaatggctgccgccggcgcagggcacggtgttcgccctggggctgaactatgccgaccacgccagcgagctggaattcaaggcaccggaagagccgctggtgttcctcaaggcgccgaacactctgaccggccatcgtcaggtatcggtgcgtccggccgacgtggagtacatgcattacgaagccgagctggtggcggtgatcggcaagaccgcacgcaacgtcagccgcgagcgcgccatggagtatgtggcgggttacaccctgtgcaacgactacgccatccgcgactacctggaaaactactaccggccgaatctgcgggtgaagagccgcgataccctgacgccgatcgggccgtacatcgtcgatcgcgacgacgtcgccgatccgcaccggctggcgctcagcacctacgtcaacggcgagctgcgccagcgcggcagtaccgccgacatgattttcgacattccgttcctgatcgcctacctgagcgaattcatgacgctgcagccgggcgacatgatcgccaccggcacgccgaaagggctggccgacgtgcggccgggcgacgaagtggtggtggagatcgagggcatcggccgtttggttaaccacattatcagtgaaaaagattacgaggagagcctacgatgaaaaccatcaaccactggatcaacggcaagaacgtcgccagcaaagagtatttcaccaccaccaacccggcgaacggcgaggtgctggcggaagtggcctccggcggccagctggagatcgaccaggcggtggcggccgcgaaagaggctttccccaagtgggccaacacgccgatgaaagagcgcgcgcgcctgatgcgccgtttgggtgaactgatcgaccagaacgtgccgcagatcgccgaaatggaaaccgccgacaccggcctgccgatccatcagaccaaaaacgtgctgatcccgcgcgcctcgcacaacttcgaattcttcgccgaggtatgccagcagatgaacggcaagacctacccggtggacgacaagatgctcaactacacgctggtgcagccggtgggggtctgcgcgctggtgtcgccgtggaacgtgccgttcatgaccgccacctggaaaacggcgccttgcctggcgctgggcaacacggcggtgctgaaaatgtccgaactgtcgccgctgagcgccgatcgcctgggcgagctggcgctggaggccggcattccggctggggtgctgaacgtggtgcagggctacggcgccaccgccggcgacgcattggtgcgccataaagacgtgcgcgcggtttcgttcaccggcggcaccgccaccggccggcgcatcatcgaaagcgccgggctgaagaaattctccatggagctcggcggcaagtcgccggtgctgatctttgaagacgccgacatcgagcgggcgctcgacgccgcgctgttcaccatcttctcgatcaacggcgaacgctgtaccgccggttcgcgcatcttcattcaggagagcatctatccggaattcgtcaaacgcttcgccgagcgcgccaaccgtctgcgcgtcggcgatccgcaagatcccaacacccaggtgggggcgctgatcagcccgcagcactgggaaaaagtctccggctatatccgcctcggggtggaggaaggggcgaccctgctggccggcggcccggataaaccggccggcttgagccacggcaacttcctgcgcccgacggtgctggcggatgtcgacaaccggatgcgcgtggcgcaggaggagatcttcgggccggtggcctgcctgctgccgttcaaatcagaagaagacggcctgcgcatggccaacgacgtggagtacggcctggcgtcgtacatctggacgcaggatgtgagcaaggttctgcgcctggcccgcggcatcgaagcgggcatggttttcgtcaacacccaaaacgtgcgcgatctgcgccaaccgttcggcggcgtgaaagcctccggcaccggccgcgaaggcggcgaatacagcttcgaagtgttcgccgagatgaagaacgtgtgcatttccatgggtgatcacccgatcccacgctggggcgtttaatcaggcctcggcatcgttcacggaatcatttttgtttcatgtgaggacttatgggtaagttagcgttagccgccaagattacacatgtgccatcgatgtatctgtcggaaatccctgggaaaaactttggctgccggcaggcggccatcgacggccataaagagatcggcgcgcgttgccgcgagatgggcgtcgacaccatcgtggtgttcgacacccactggctggtgaacagcgcctatcacatcaactgcagcgcgcatttctccggcgtgtacaccagcaacgagctgccgcatttcatccgcgacatgacttacgactacgacggcaacccggcgctgggccagctgatcgccgatgaagcctgcaagcggggcgtacgcgccaaggcgcacgacatcccgagcctgaagctggaatacggcacgctggtgccgatgcgttacatgaatgccgacaagcatttcaaggtggtgtcgatctcggcgttttgcaccgtgcatgacttcgccgacagccgccggctgggcgaggcgctcaaaagcgccatagaaaaatacgacggcaccgtggcggtgttggccagcggctcgctgtcgcaccgctttatcgacgatcagcgcgccgaagagggcatgaacagctacacccgtcagttcgaccagcaaatggacgaacgggtggtcaagctctgggaagaggggcgctttcgcgagttctgcgaaatgctgccggagtatgccgattattgctacggcgaaggcaacatgcacgacaccgtgatgctgctgggcctgctcggctgggacaagtacgacggcaaggtggagttcatcaccccgctgttcgccagttccggcaccgggcaggtcaacgccgtgttccctttgcccgctgaagcctgaggtgtgtgaatgccccatttttacgctgaatgtaccgacaatatccgccgcgaggcggatttgcccaccctgttcgccaaggtcaacgaggcgctggcggcgaccggcatcttcccgctggccggcgtgcgcagccgggccatctggctcgatacctggcagatggccgacggcaagcaggattacgccttcgtgcacatgacgttgaagatcggccacggccgcagtctggaaagccgtcagcaggtgggcgagatgctgtttgcgctgatcaaggaacacttcgccgcgctgatggcgcagcgttacctggcgctctctttcaccatggaagagctggatccggtgctgaattacaaacagaacaatgtccacgcgctgttcaacaaggcgtgaataaggggtcgtaaatgctggataaagagcaggttaaccgcgccgtgcagcgtctgcatcaggcggaaaagagccgtgagcagatccgcgcgttgtcgctcgatcatcccgagatcaccattgaagacgcctatgccattcagcggcagtgggtagatctgaagatcgccgaggggcgcacgctcaaaggccacaagatcggcctgacctcgcgcgccatgcaggtgagctcgcagatcaccgagccggattacggcgcgctgctggacgacatgttcttcaacgacggcagcgacattccgatcgatcgctttatcgtgccgcgggtggaagtggagctggcgttcgtgctggccaagccgctgcgcgggccgaactgcacgctgttcgacgtctacaacgccaccgactacgtcattccggcgctggagatcatcgacgcgcgcagccacaacgtcgatcccgagacgcagcggccgcgcaaggtgttcgacaccatctccgacaacgccgccaacgccggggtggtgatgggcgggcggccgatcaagccggatgcgctggatctgcgttggatctctgcgctgctgtaccgcaacggcgtgattgaagagtccggcgtggcggcggcggtgctcaaccacccggccaacggcgtggcctggctggccaacaagctggcgccgtatgaggtggagctggaggcggggcaggtgatcctcggcggttccttcacccggccggtgccggcgcggcgcggcgatactttccacgtcgattatggcccgatgggctgcatcagctgccgcttcgtctaataagcaggctcggcgaaccgggccgcactaaaccgggcgggggccaagcgccgcgcccgcttgtcagggagaatacgatgttaaccaaccacttcaagcgagcgctgcaggaaaaacgcccgcagatcgggctgtggctcgggctgtgcagcagctacagcgccgagctgctggccggcgccggtttcgactggctgttgatcgacggcgaacatgcgcccaacaacgtgcagacggtgctggggcagctgcaggcggtcgccccttaccccagccagccggtggtgcggccgccgtggaacgacgcggtgatcatcaagcaactgctggacgtcggcgcgcaaaccttgcttatcccgatgattcagaatgccgaacaggcgcgcgacgcggtgcgcgccacgcgttatccgccgcacggcgtgcgcggcgtcggcagcgccctggcgcgcgcttcgcgctggaaccgggtgcccgattacctgcagcaggccgacgagcagatgtgcgtgctggtgcagattgaaacccgcgaggcggtgaaaaatctggaggcgatcctgcaggtggaaggggtggacggcgtgttcatcggcccggcggatctcagcgccgacatgggcttcgccggcaatccgcagcatccggaggtgcagcgcaccatcgacgacgccatcgcgcgcatccgcgccgccggcaaggcgccgggcattctgatggccaacaaggcgctggcgcagcgctatctggaagccggcgcgctgttcgtcgcggtaggggtggataccaccctgctggcgcgggcggcggaagccctggcggacgagttcaaacagggcggggcgcaagcgccttcatcgggagtctactgaaccatgaaccacgtcgattcgctgccgccggccaacccggcgcagcaacataaagcgttaaccgccgccgagcaatcggtgattaaaaagttgtttcggcgcctgattattttcctgttcgtgttgtttgttttctctttcctcgaccgcatcaacatcggcttcgccgggctgacgatgggcaaggatctcggcctcagctcgaccatgttcgggctggcggcgacgctgttctacgccacctacgtgatcttcggcattcccagcaacatgatgctgagccgggtcggcgcgcggcgctggatcgccaccatcatggtgctgtggggcatcgcctccacctgcaccatgttcgccaccgggccgaccagcctgtatgtgctgcgcatgatcgtcggcatcaccgaggccggcttcctgccgggcattctggtgtacctcacctactggttcccggcgttctaccgcgcccgcgccaacgccttgttcatgatcgccatgccggtgaccatggcgatcggctcgctggtctccggctatattctggcgctggacggggtgatgaacctgaagggctggcagtggctgttcctgctggaaggcattccgtcggtgctgctgggcgtggtggtgtggttctacctcgacgacacgccggccaaggccaagtggctgaccgacgaggaaaaagccagcctgaaggcgatgatggaggccgataagctgcagctggtgcagcccaacgggccgagcagccaccgcgcgctgcagcagcgcagcctgtggcgcgagatcttcacgccgatcgtgctgatgtacacgctggcctatttttgcctgaccaacaccctgagcgcgatcaacatctggacgccgcagatcctgcagagcttcaaccaggccagcagcaacgtgacgatcggcattctggcggcgatcccgcagatctgcaccatcgccggcatggtgtggtggagcaaacgatccgatcggctgcaggagcgtaagcatcacaccgcgctgccgtacctgttcgccgccgccggctggctattggcttccgccaccgatcacagcctgatccaactgctggggatcgtgatggcgtcggtcggttcctttaccgccatggcgatcttctggaccacgcctgatcagtcgatcagcctggaagcgcgggcggtggggatcgccgtgatcaacgccaccggcaacatcggatcggcgctcagcccgctgttgatcggctggttcaaggacatgaccggcagcttcaactccgggctgtatttcgtctcggcgctgttgatcgtcggcgccgtgctggtgtggcgcatcccgatgaaggattcgcgcccgagagcgacgccttgatacgcagacaggcaggattgcaggaggtaatgaggtgcggaaaagtaccggttttatcgccaacatcgatatttgcaaagagtatgacgcgcgctacgccgccgacgaggtgcactacgaaaccttcgccgggctggcggcattcttcggccgcgacatgcaggtgcactggcacgactgcttcttccaggtgcattttctggagaccggcaagatagagctgcagctcgacgatcagcactattcggtgcaggcgccgctgttcatcctcacgccgccgtcggtgccgcatgcgttcttcaccgaaccggacagcgacggccacgtgctgacggtgcgtcaggagttgatttggccgctgctggagcgcctgtaccccggcagcaacctggcgctcgacatgccgggcatctgcctgtcgctggccgacgcgccgcaggagctgacggcgctcagccactattgggcgctgatccgccgcgagttcgcgcagaacctggccgggcgcgaacagacgctggcgctgctggcgcaggcggtgttcacgttgctgttgcgcaataccgcgctggaagacagcgccaacagcggcgtgcgtggcgaactgcagctgttccagcgcttcaacaagatggtggacgagcgtttccgcgagcatctgccggtgccggagtatgcgcaggcgttgggagtgaccgaatcgcggctcaacgacctgtgtcggcgcttcgccaaccggccacccaagcggctgatcttcgatcgattgctgcgcgaggccaagcgcatgctgctgttcagcgcctgcacggtgcatgaaaccgcctacagcctcggcttcaaggatccggcctatttcgcccggtttttcaatcggctggaaggctgttccccttcaacctaccgcgcggcgcaacacgccctttcgtaaccgcgatcacagtttgctgcgaaagcggcaaactgacctgaaaagtaccggcgattgccgcaaaagtctcttctcgaaaccggctttggcagcttcaattaagcaaccaaaagaaaacattattttaacaaatggccgactccacggcctgaaaaatgccgatgacgaggaagacccgatgaaaccagaagactttcgtgccgacagcaagcgtccgttcaccggcgccgagtacctgaaaagtttgcaggacagccgcgaaatctacatttacggcgaacgcgtaaaagacgtcaccacccacccggcgttccgcaatgcggcggcctcggtcggccagctgtacgacgcgctgcacgatccggccagccaggatcgcctgtgctggaataccgacaccggcaacggcggctacacccacaagttcttccgctatgcccgcagcccggaggagatgcgccagcagcgtgacgccatcgccgactggtcgcgccaaagttacggctggatggggcgcacgccggattataaggcggccttcggctgcgcgctgggcgcttatccggagttctacggccagttcgccgacaacgcgcgccactggtacaaacgcattcaggaaaccgggctctattttaaccacgctatcgtcaacccgccgatcgatcgtcataagccggtcaacgaggtgaaggacgtctacattcaggtggagaaagaaaccgacgccggcatcatcgtcagcggcgccaaagtggtggccaccaactcggcgttgacccactacaacttcatcggtttcggttcggcgcaggtgatgggcgataatccggacttcgcgctgatgttcgtggcgccgatggacgccgaaggggtgaagctgatttcgcgcgcctcctacgagctggtggctggcgccaccggatcgccgttcgactacccgctcaccagccgctttgacgagaacgatgcgatcctgatcatggatcatgtgctgatcccgtgggaaaacgtgctgatctaccgcgatttcgaccgctgtcgccgctggagcacccagggcggtttcgcccggctgttcccgctgcaggcctgcgtgcgcctggcggtgaagatggacttcatcaccgcgctgctgcaaaagagcctctcgtgtaccggcgtgctggagttccgcggcgtgcaggccgatctgggcgaagtggtggcctggcgcaacctgttctggtcgctgagcgacgcgatgtgcgccgaagccacgcaatgggaaaacggtgcctacctgccggattccgccgcgctgcaaacctaccgcgtgatggcgccgatggcctacaccaaggtgaaacacatcatcgagaagaacgtcaccagcggcctgatctacctgccgtccagcgtgcgcgacatgaacaatccggagatcgacaagtacctggcgcgctacgtgcgcggatcggacggcatggatcacgtcgaacgcatcaagatcctcaagctgatgtgggatgcgatcggcagcgaattcggcggccgtcacgagctgtatgagatcaactacgccggcagccaggatgagatccgcctgcagtgcctgcgccacgcgcagggatccggcaacatggatcgcatgatgcagatggtcgacaagtgcctggccgattacgatcagcatggctggaaggtgccgcacctgcggaacaatgacgatattaatcagttggataatctgctgaagtaattcaggaggaggttgtatgtctcaggaaaatgaacagcggttgcgctttcgcgacgcgatggccagcctgtcggcggcggtgaatatcgtcaccaccgacggcccggcggggcgctgcggcatcaccgccacggcggtgtgctcggtaaccgatacgccgccgacgctgctggtgtgcatcaaccgcaacagcgcgatgaacccggtatttcaggaaaaccgcaggctgtgcgtcaacgtgcttaaccacgagcaggagctgatggcgcgccacttcgccggcatgaccggcgtcagcatggaagatcgtttcaggctggaagagtggcagcttggcgcgttggggcagcctgtattgcgcaataccctggccagcctggaaggggagatcgagcagatccagagcatcggcacccaccagatgtacctggtgcagatcaagcagatcgcgctgagtgaagccggcaacggcctgatctatttcaagcgcaacttccattcggtgatccaccagatggcggtgccggcctgaggcgtgggggcgcagttggctgcgcccctcatctcaactcttgttggccgccagatcgctcaccaggcggttgaccggatcgctcatgttggtgaacttgctcagctccgaacgggtcaccaccacgaacaccccgacgtttttcgccgggatcatcgccatgtaggtaatgaatccgccgccgccgccggtcttctgaatgatgcccggcagcccgtccttcggcgccatatacacccagcccaatcccaatgcatccgcttgtcccggcacgtccatgcccttcagcgacaccagatcgtggcgctggaagtacatggtttgctcgctggcggcggtggctttgcgcgggccgctggcgctggaagagaggaactgctgcatccagcgctgcatgtcgcgcggggtggagtagacgccgccgctgccggccgcggcggtggtgtcgcgacaggcgctcgggccggccgccgccaccatcaggcgcgagcactgttcggggctcggcgtcaacgtggtgtcgaccatgccgagcggcgcggtgattttctctttcagcagcgcgctgtaaggcttgcccgcggcgcgcgagagcgcgtcggccagcagatcgtacgccaggttggaatacgcggcgcgcacgcccggcggcaccgtgacgttggcatgcgccagccattgccagcgctgagccttggtcggccaggtgaataccggcgttttcggcggctttttgcccggctgctcgcgcggcaacgcgctggtgtgggtcgccaggtttaataacgtgatcggctggccggcgttgtaagacggcacataggcgcccttgggagcgtacttgcgcagcgggtcggtcagcttgacctggcctgccgccgccattttcaccatcacttcgctggtcatcagcttggtgatcgaggcgatgcggatcagcgaatccgggcgcgggcgcaggttgttgccgggcttggtgtcgccgaagctgcggttaaccacctgattgccgtcgatcaccaccagcgccatgccggtggcgccgctgttgtagaaaatatgttcggcatactggtcgacgatttgcgaagccagctgcgggggcgcggcctgcacggccagcggcgcggcgcacaggcccagcgccagcaataaagcggagacagagttcttcaacggtcgttatccatttaacaatgcagcgggaaagggcgtaatccatcgcccagtgtaatgcgcccgcccccccgctgcatgtagaaaaaagagcggtggcgataaaattttttaaccgccggcggcttactgcgcgcgggcgaaaatggcgatcacttcgtccaggtgcgccttcatcgccttgcgggcgccgcgcacatcgcgcgcttcgatcgccgccaggatcgcccggtgttccagctcggagcggtgcggcatgtcgtccggcgtatagtggcgctgcagcacgcggaacatgctgccgtagcggtggccgagcagatgaccgatgatgaacgcgtaagccgggttgccgctggcctgggcgatgcggatgtggaacagccgatcgccggggtgggtggcggagccggcgcggttatcgcggcagttctgctcataggcggcgcggatgcccgccagctcctcgtcggtggcgtggcgcgcggccagcgcggcggtctccggttcaatcagcaggcgggtttgcagcagtgaaaacggcggcagctcggcgttgaaatccagctcgatattcagttcgtcgtcgatctccgcccactggttgcggccggcctgggccatcaccgactcctgcgacgccgccggtggcgtttgcgaacggacgatcaccccgttgcccactttgacgtccaccaggccgatcacttccaatgcgatcagcgcctcgcgcaccgacgcgcggctgacctgcaattgctgggcgagatcgcgctccgagggcaggcggctgccaggcggaaattcgttattctcgataagacgtttgagctggtcggctatctgtctgtaaatccttgggttttccagtcgggtaatcggcatttttgacctttgacgattcggcgttcagtgatttggcgcacaattatgcgacaaggcgcttgagtaatcgttattcaagtgtaaaaaaatggttaattgaaatgtggtttcaaggctgttttattaacttcttcccccaacgataacgcgtaaagcgtcttttgtcatgttagaggcctgacctttaatcgcccttagtggcctgaccattagacctttaggccgaggagtcaagatggatttaaccgggaaacgcgtactgatcaccgccgccgggcaagggatcggttttaccaccgccaggctgttcgccgccgccggtgccgaggtgatcgccagcgacatcaacctcgagcgcctgcagggctgcgccgggatccgcgcgctggcgctgaacgtcaccgatccggccgccatcgcggcggcggcggaggcgatcggcccgatcgatgtgctgttcaactgcgcaggcgtggtgcacagcggatcgatcctcgattgcagcgaagatcagtgggcgttcgcgctcgatctcaacgtgaccgcgatgttccgcatgatccgcgccttcctgccgggcatgttggcgcgcggcaaaggctcgatcatcaacatgtcctcggtggcttcgagcgtgaaaggggtgccgaaccgcttcgcctacggcgccagcaaagcggcggtgatcggcctgacgcgctcggtggcggcggattacgtcacccagggcatccgctgcaacgccatttgccccggcacggtggaatcgccgtcgctgcgccagcgcatcaatgagcaggcgcgcgaacaggggcgcagcgagcaagaggtgtatcaggcgttcgtcgcccgtcagccgatcgggcgcatcggcaccaccgaggagatcgcccagttggcgctgtatctggcctccgacgccagttcgtacaccaccggcacggtgcagatcatcgacggcggctggagcaactgagccgccatttttgagagaggaacgcatgaaacttttacgttacggggaacccgggcaagagcgccccgggatgttggatgcgcaaggtcgcctgcgcgatctgtcgcagcatatcgccgacgtgggcggcgccgcgttattgccggcatcgctcgccaaactgcgcgcgctggacagcgccgcgctgccgctggtcgaggggcagccgcgcctcggcgcctgtgtcggcggcatcggcaagttcatctgcatcggcctgaactacgccgatcacgcggcggaaaccggcgcggctattcctgaagaaccggtggtgttcaacaaatggaccagcgcggtggtcggcccctacgaccgggtggagatcccgcgcggctcgcagaaaaccgactgggaagtggagcttggcgtggtgatcggcctgggcgggcgctacatcagcgaaacggacgcgatgagccacgtcgccggttattgcgtgatcaacgacgtctcagaacgcgaatatcaaattgagcgcggcggcacctgggacaagggcaaaggctgcgacaccttcgggccgatcgggccctggctggtgaccgccgacgagatcgccgatccgcacagcctgaacctgtggctggaggtggacggcaagcgctatcaggacggcaacaccagcaccatgatcttccgcattccgcagatcgtcagctacctcagccgctttatgagcctgcagccgggcgacgtgatctccaccggcacgccgccgggcgtcggcatggggcagaaaccgcagcccatctacctgcgggcgggccagacgatgcgtctgggcatcgaagggctgggcgaacagcgccagcaaaccgtacaggcttaaccgggagcgccgccatgaccaccattaccgcactgcgggttgaagacattcgtttccccacgtcgctggggctggacggatccgacgccatgaatccggatcccgactattccgccgcctacgtgatcctggagaccgatcgcgcggatctcagcggccacgggctgacgttcaccatcgggcgcggcaacgagatctgctgcgcggcgatccgcgcgctggagcatcagatcgtcggcgagcggctggagacgatcgccgccgacatgggcgccttctggcggcgcttcaccagcgacagccagctgcgctggatcgggccggacaaaggcgctattcacctggcgaccggcgcggtggttaacgcggtgtgggatctgtgggccaaatcggtcggcaaaccggtgtggcggctggtggcggagatgacgccggaggagctggtgcgctgcatcgacttccgttacatcaccgactgcatcacgccgcaggaagcgctggcgctgctcaagcagcgggccgagggcaaagaacgccgcctggaacgactgctgcaggaagggtatccctgctacaccacttcggcagggtggttgggttatccggacgacaagctgcgccgcctgtgccaggaggcggtcgacgccggtttctcctacctgaagctgaaggttgggcgcgatctggaagacgacattcgccgggtgcgcatcgcgcgtgaggtgatcggcccggatcgccggctgatgatcgacgccaaccaggtgtgggaagtcgatgaagccattccgtgggtgaagcatctggcgttcgccaaaccctggtttatcgaagagccgaccagcccggacgacgtggaagggcatcgccgcatccgcgaaggggtggcgccggtcaaggtggctaccggcgagatgtgccagaaccgcatcatgttcaagcagttcatcatgcgcggcgcggtggacgtggtacagatcgacgcctgtcgcctcggcggcgtcaacgaagtgctggcggtgatgctgatggcggccaaataccagctgccgatctgcccgcacgccggcggcgtcgggctgtgcgaatacgtgcagcacctgtcgatgatcgacttcctgtgcatcgccggcacccacgagggccgggtgatcgagtacgtcgatcatctgcatgaacactttgtcgatccctgcgtgatcaagggcgcggcctacatgccgccgagccgtcccggttactcgatcgagatgcatccggcgtcgatcgagcagtatcggttccgcgggtgaagcggggggatcgcatgccgcgcatcgacgctcaccagcactactggcgctaccacccgcagcattacccgtggatcgacgagcggatgcgcgtgctgcggcaggatttcgatccgccccggctgcggccgctgttgcaggaacacggtttcgacagcgcgctggcggtgcaggcgcgccccagcgaggaagagacgctggccttgctggcgctggctgagcagagcgagggcgtatgcggcgtggtggggtggctggatatcgcttcgccacagctggcgcagcgtctggaaactttgcggccttatcgcgcgctgcgcggggtgcgccatcaggtgcaggacgaagcggatccggcggcctggttggcgcggccggaggtggaacgcggcatgcaaacgctgcagcgcgccgggtatgtgtacgagatcctggtgacgcaccggcatctggcggccgcggtggcgctcgccgcccgccatgacgagcactggctggtgctggatcacctcggcaagccggacatcgcccgcggcgcgcggcactgggcgcagcaaatccggccgctggcggcgctgccgcacgtggcctgcaagctctcgggactgatcaccgaggcgccgggcgggcggtggcgggcggaggagctgctgccgttcttcgacgccgcgctggaggctttcggcccgcagcggctgatgttcggctccgactggccggtgtgcctgttggccggcgactaccgccaggtggtgcaactgtgcgaacaggcgctgtcgacgctgggggccgccgagcaggcggcgatttggggcggcaccgcctggcgaatttacggtttaacggagtctggttatggatctgtatctgcaagataaggtggtgttggttaccggcggcggttccggcattggcgcggcgatttctcatgtgctggccgaggaaggggcgatcccggtgctggtcactaacgccgcgccggaggcggcgctgctggccgatttgcagcggctgcagccgcgcaccgaggtgatcctcaccgaattgtgcgacgaggcggcctgccgccgggcggtcagccatacgctggcgaccttcggccgcatcgacgggctggtgaataacgccggggtcaatgacggcgtcgggctggaggcggggcgcgaggcgttcgtcggctcgctggaaaagaacctggtgcactactacctgatggcgcacctgtgccaggcggcgctgcgggagagccggggcgccatcgtcaacatcgcctccaagaccgcgctcagcggccaggggggcaccagcggttacaccgccgccaagggcgcggtgctggcgctgacgcgcgaatgggcggtatcgctgcgccatgagggggtgcgggtgaacgcggtggtgccggcggaggtgatcaccccgcagtaccagcgctggctcaacaccttcgccgagccgcagcggcagatggataaaatcaccgcgcgcatcccgctcgggcagcgcatgaccacgccgcaggagatcgccgacaccgttgcgtttctgctctcgtcgcggtcatcgcacaccaccgggcagtggctgtcggtggacggcggctacctgcatctcgatcgggcgctgacgtgagcggcgcggcggcagggcggcgccgtttctgccaggcgctcgatctgattgactcaccggcgctgattgcggagtaccagcagcatcatcagcgcatttggccgggcatcgccgcgcatttgcgcgagcacggcattctggacatggaaatttaccggttgggcacccggctgttcatgatcgtggaggtcagcgccgatttcgacgccgcgcgctttgacgccgccagcctgaacaaccccgaagtacagcgatgggaagcgctgatgtggcactaccaggccgccaccccctggacgccgcagggcgaaaaatgggtggaaatggcgcggattttctctctgcaacagcaataacgccaacatcatcatcgccagacgatacgagggtatcaccatgcttgctgaaaaaagtgcggcctccgcgcagccgggcgtccccgtgaccgccaatctgcgctgggcctttatcctggtcaccagcctgttcttcatgtgggggctgtcctacggcctgctggacgtattaaacaaacattttcaggagacgttgcacgtcaccaaggcgcagtcggggctgctgcaggcggcctacttcggcgcctatttcctggtggcgctgcccgccgggtactttatggatcgcaagggttataaggcgggcattctggtcgggctgtgcctgtacgcgctgggggcgctgctgttcgtgccggcggcgtcggccaacagcttcggcgtgttcctgtttgcgttgttcgttatcgccagcggcctgggctgcctggaaacggcggccaacccttacgccacagtgctgggcgacgcgcagggcgccgaacggcggctcaacctggcgcagtcgttcaacggcctcgggcagtttatcggcccgctgatcggcggcacgctgttcttctccgccagccagtccgccggcgacggcgatcagagcgcggtgaagatgacctatgtggcgatcgccgcgctggtgttgctgatcgcgctgttgttcagccgcacccggctgccggcgatccgcgaagaggaaaaaccggtgcacggcgtgatagcgcagggattgtggcagcatccgcatttcgtcggcggggttatcacacagttcttctacgtggcggcgcaggtgggcgtgggggcgttcttcatcaactacgccaccgagcactggcgcgaggtgtctaaccagaacgcctcttacctgctgtcgatcgccatgatctgctttatggtcgggcgcttcttcagcacctggctgatggggcgagtcaaaccggcgacgctgctggcggcctatgcgctgatcaacatcgcgctgtgcggcgtggtgatgctgagcgtcgacggcgtatcggtggtggcgctgatcgcggtgttcttctttatgtcgatcatgttcccgaccattttcgccctgggggtgaaaaatctgggcaagcacaccaagcgcgccagctcctttatgatcatggcgatcgtcggcggcgccatcatgccttactttatgggggcgctggccgaccgttacagcaccgcgctctcttatctgctaccgctgctgtgcttcgcggtggtgctggtttacggcctgcggcagcgccgcgcctgattcaccccggcggcgaatcggccttcgccgccgcttttggcatctgccgccgggttcccatcaggatggccaacgccagcagcagcaccaggccggacagcgcgccgtttatcgtcaggccgccggcatccaccaccagcccgcccaccagtgaaccgcaggaaatcgccaggttaaacagcgcgatatacagcgaagaggcgacctcggccgcatcgggcgccgccttgagcatccacgccatcagcgcaacggaaacgccaccgtaggcgatgccccacagcagcaggaaggcgccgccgctcagcggcgcgtggcccagcagcggcagcagcaggacggcgagcgccagcccgagggcgatcagcgccagggtgcggcgcagccgtttggcggcggcctggccggcgatgaaattcccgacgaggccggcgacgccgtaggcgaacagcagcggccccacccagcggctctcgataccggagaccgtctgcagcagcggacggacaaaggtgtaagccataaagtgaccggcgaccagcaaaaacgtcagcagcagcccggtcagcagccggcgattcgcgcgctgcgcggtgaacgacctccagcttatcgcctgcgtgaccggcagcggcggcagcacgcacaccagcagcagcagggtcagcgccgccagaacggcgaccgccagaaacgccaggcgccagcccagcgcttcgccgaggaataccccgagcggcacgccgaacaccgaggccgccgctacgccgccgaagatgacggacagcgccaatccgactgaggccggcggcaccaggcgttccgccagcccgccggcgatggcccagataccgccgatgcaaaaacccagcaggatgcgcgcggcgaacagcagggccagggaggtggcggcggcggccagcaggttagcggcgatcagcagcagcagaaagcccgccaacaggccgcggcggtccgtgcgccgggcgcccagcaccaccagcggggcgaacagcgcggcgaacagagccggcagggaaatcagcagcccggcgcggccgatcgtcgcgttcagtgtattgacgatcgggctcagcagcccgacgggcagcatttctgcggtgacgacggtaaaggtggacaggccgaccgtgaaggtggccagccacgcttttgcgccgccgtcggcgtgtaaggcactcataatgactctcccaacagatgaagaacttcagtgtatccgcgccaaaatggctgataaactggcctgaatgcgcaacattggggacaaatcgtggctaatttaccgtctatgccgttggataacctgaccgacctgctggtattcattcgcgtcgccgacgcctgcagcttcacgctggcggccgagaggctgggcatctcccgttcggcggcgggcaaatgcgtgacccgattggaggcgcgattggcgacccggctgctgcagcgcaccacgcgcagcgtcagcctgaccgaagacggcgcggtgttttacgagtatgcgcagcgtatcctgtcgcaggccgaagaggcggaaacggcactcaatacgcggcggcaaaccccgcgcgggcggctgcggctggatgtgccggtctcgttggggcgattgcacattttgccgattttgcgggagtttttggcgcagtggccggaggtggacgccgacgtcagcttctccgacgattacagcgatttggtgcgcgacggcatcgacgtggcgatccgcgtcggcggcagcgacgacagccgactggtgcggcgggtgctcgcgccgcaccgcctgatcacctgcgcggcgccagactatctggcgcggcacggtacgcctgggaaaccggaagcgttgggcgatcatgagacgctggtcttcagccatcaggggttgccggcgccgtggcgctatcgggttaacggtcaactgcacgaacagccggtgcgcggccggatgcgtttcaacaacgtcgaggcattgcgtgatgcggccgtcgccggggccggtctgtgtcaggtaggagcgtttctggtcggcgagcagattgcggccggcacgctggtgccggtgctggagcgctattgtcgcccggggccgccgatctgcgccgtctatcccagccggcgccacctctcccccaaggtgaaactgtttctggcggcgatcgaacggcgctggcagggcaaggcgatttgggaaagcgcctagcgcgagcggttcatgccgcttgcacggccagcgttcgccgcattaagcgatagccgccggccgccaccagcagtacgaccaggccggccgtgagcgtgacgccaaagccggccttgatccccaccgcatcgatcgccagccccgccagggcggcgccgagcgccacgccaacccccaggccggtcaccatccaggtcaatccttccgtcaagcgtgaaggcggcacgaggcgttcaactaaccccatggcgacgatcatggtcggcgcgaaaaacagtccggcgacaaacatcgccgccgccagcgttaagacattgtgcacccacagcagcggcagcgtggtgagtgcggtggcgaaggcggcgtataagaactgccgaggcaatggggacggcagctttattgcgccgaaaatcagcccggcgaggcaggagccgcctgcgtaaaccgacagcacgatgctggcggcggccggctgcccctgctgctcggcgaaggccacgctgatgacgtccacggtgccgacgatggtgcccagcgcgatcagcgccagcaccaggatctgcatcgacggcatggccaggatggcgcgctgccgctggttattgcggggataaaccgggggctgagtgcttttttgccaggcgaatgccgaaacgcccgccaccagaagcagcgcggccgccagagggccggcctcagggaagagcgcaacgctgagccccacggcgatcggcgggccgacgataaaggccacttcgtccaacaccgactcgaatgaaaatgccgtgtgcagctgtggcgtgccgcgatagatttcgctccagcgggctctgaccatcgcggagatgctgggcatgccgcccgcgagcgcggcgaagacgaacagcgtccagtccggcgcccgatagtgggtgcagatcagcagcagcaacagggcgagtgcgctgagcccggtagcgtagggcagcacgcgactttggccgtagcggtccgccgcgcgtgcgatttgcggcgcgagcagcgccatggaaaaggcgaatgtcgccgccaccgcacccgccagccaataggagccgtgtacctgcgaaagcatggtgatgatgccgataccggtcattgagatcggcaggcgcgcgatcaacccggcagaggaaaacgccttgctgcccggtgcgctgaacagtgtgaaataaggatttgccatgaatagggctcctgaatgttggcggctcggtattcgcgcaatgcccatcattgacatacgccacgtatgttacgttaattgacatacatggcgtatgtcaattataacgtcatcaatggcgagacgggagtgaatccatggcacgtaaagcgcgcacagaaatgattgaagaaacccggcgtaagctggtggcggccgcccgtcagcagttcggtggcgtggggtatgccgagacggtgatggatgagcttactgcgcaagccggtatgacgcgcggtgcgctctatcaccattttggcgacaagaagggattgtttttggccgtcgtgcaggaaatcgacgccgaaatggatgcgcgcctggccgacattaccgcgagcacgccagatgactgggaggccttcgcggggcgttgccgcggttatctgatcatgatgacggagccgcaatcgcagcgcattctgttgcgcgattcgccctcggtgctgggagccgactatctgcaggccagcaaactgggttgcatcacctggatgacgggggccttacaggcgttgatggcgcagcggcgtatcgctaccgccgaaccggaagcgctggcgcatttaatcaatggcggcctgatggatgctgcgctgtgggtcgcccatcagccggaaaaagacgtggcgctggagcaggccttggccagtttgaacctgttgttgaacgggctgcgctccacctctgcttaagttttactggcggccgccgcgccgtttcggcggcggcttaagggtgaatgacgacgggctggacgttttgcgccagctggatattgttgcggccgctgtgtttcgccagatagagcgcggcgtcggctgcgcctatcgccgattcgatgtccagtttttccagcgcggagatgccggcgctaagcgtcagcgtgccgctgtgctgcgggctggcgccgtgcgggatgttcagttccgccacgcgttggcgcacccgctcggccagctgcgccgcgtagccttcgtgcacgttggtcagcagcaccaaaaactcttccccgccgtaacgcaccacgatatcgcgcgaacgcaccgcatcgcggatggcgaccgccacctgcaccaaagcccgatcgcccatggcgtggccgtagctgtcgttgtagaccttgaagtggtcgatatccagcaatagcacgtaatggtggccggtttgcggttccagcagcatagtgatcttattctccagaccacgtcggttataaaggccggtcaggggatcgagcatgctcaaattattgaatttgtcccgctcgttatacaggttggccaccagcgcgtgggtaaagatttcactgcgtttcaacatcaggtggtgaatggagaaagcgataataggtaatagcgtggtgaataatatccgcagggtattatgcatgccgtctagagccaggatcatcattgcggaaggtacggcgtgtaaacaaaaggcggtaaagttatccgtcagagaaatagcgctgataaaaaagatgctaaacaaactaattaataaaaaatcttggttattcggtaggcaatattgacttttaacgtaaatatgtgcggcccagagcaggccgagtacgctggcgaacaggttgagtttgcacaaatatttacgtggcgtttgcagggaaaatagcgccgctaccagacaaaatagcggtatacataataaaggtagggtaaatgcgggcgtatccctaaaagggaacaataatgtaaatacggaagaggcggcattcattaccaaaaaaagaaataatgccaggcgctgcttgctgttcagtaattcctgataagaacgggcgttcatacggaggtcactctttgcaaagtcgttctgtcgaataattaaggttgagaagcattcctttggcgcgaatatccacttgaattgcatggttgaggattgtgattattatcatgcaaacaggactaggaattttcttatgtcaaattatcattttttcctgctggtgtcatctgagtttggtcagcgcagtgaaaatgatgcagcggccaaaaaagtgttatatgatattggttatcattatcacttaaggaggggtgtcatgctcactgccatgattgccgcgtgcgggctgtggggcgtcagttggtgcctcggggatcgcctggccagcgcctggggcgttttgctaccttgtgcgttgatgccgctgctggccttgatcaacctggatatgctgcagttgcgcaccctgatcgtgatagcgatgttggccacgctggtgatgctgttcaacagccggctgcgccactatctgctgttgccttcctgcatggcgctggcgggcggcctggcggcagtcagcctcaacttcagctttgggtgaaacgccagaaacggcaaaaccacgcttaagcgtgtttatcatcaatgcgttgggattttttcgaaggaactactggagagatcatcaattggtgcgaagagagggacttgaaccctcacgtccgtaaggacactaacacctgaagctagcgcgtctaccaattccgccaccttcgcatcgatgctgagtgcaatataaatcatgtggttattggtgcgaagagagggacttgaaccctcacgtccgtaaggacactaacacctgaagctagcgcgtctaccaattccgccaccttcgcacagtcgatgttgttgctttgatttatattacgtcgccagcttggtgcgaagagagggacttgaaccctcacgtccgtaagaacactaacacctgaagctagcgcgtctaccaattccgccaccttcgcgtaccagaaacattaccggagtaacgttaccacggaggcgaattctagagattttggcgggcacgtcaacagttatttccccgctttgcgggcgtttgctggaaaaacagccatatcgccgcttttctgctggtcaaacagccaaatcagccaatcaatcaacaccctgacccgcggcgccaggaaacggccgggcggatacatgatgtaaatcggcattggcggaggcggcgtgtccgccaacacctccaccagctctccctgtttcagccagggcgccagcgaatagcgcgccgcctgaatcaagcccatgccggcgcgtgcgccggcgatgtaggcgtcggcgccgctgacgctgagccgggcgggcagctcgcgcagttccagcttgccgccgcggcagaattccagcgggtaatcgcggttgctggccagtgaaaaataccccaccgcgcgatgcggctccaggctatcgatgtcaagcggcgtgccgtgggcctgcagataagcgggggaggcgcaggtgacctgcggcagctgggcgatgcgccgcgccgccaggccgtcgtcttcggtttcccaggcgcgcagcacgcagtccacgccttcgcgcaacagatcgacgtgggtgtcgttggcgcccagcgccagcgtgatgtcgggataccgccgataaaagtcgtccagcgccggaatcaccacctcgcgcgccagcgaatggggcatatcgatgcgcaccttgccggacggctgcagcttatgctggctgaacaacgtgtccgcctcttccagcgcccccagcagctgtacgcagcgctggtaatagaggctgccttcgctggtcacctgcacctggcgggtggtgcggatcagcaggcgcacgcccagccgctgttccagccgtttcagcgcgttgctgaccgtggcgcgcggcagctgcaggcgttcggccgcccggctgaagctacccagttcgacgatgcgggtaaaaatgcgcatggcttgaacctgatccatgtccactccggattgttggtgatttttgaacagtgatgtgcaatctgcattatttatctttgtcgcgtaaacaaccagactttgctgcgttatccattcaccgcatgagggcagcacaatgcaacaacgtaaactcggttccaacggtcccgtcgtctccgccctggggctggggtgcatgggcatgagcgacttctattccaccggcgccgatcggcaggaggccatcgccacgctgcaccgggcgctggagttgggcgtcacgctgctcgacaccgccgacatgtacgggccgcacaccaacgaagagctggtgggggaggcgatcaggggcaagcggcaacaggtgttcctggccaccaagttcggcatcctgcgcgatccggcggatccttcggcgcgcggcgtcagcagccggcccgagtatatccggcgctccgtcgaggggagcctgcggcgcttgggcgtggaggagatcgatctctattatcggcaccactccctcttcctgtaacgtccgcaatcatctaaaaacatattaaataacaattcattgattgggttttgtgtccgtgactgtccggctctgtcctgtggaatccaatatcaggtgtgtgtagaattacgtgtaccttagttcgatcttgaattcctatacacatgcgacttaataacttacaaatccggaatgctaaacccacccctaaaccttacacgctgagtgatggattaggcttgtcccttctgattgagcccaacggcagtaaaagctggcgctttcgttaccgtttttccggtaagcccaagatgatttcacttggtgtttatcctgccgtttcgttggccgatgctcggtcaaaacgcgatgaggccagaaaacaggttgccgaggggcagaaccccagcgcactccgtaaagagaaaaagctggcgcagttatacggggatacgaatacctttgaagcgatcgcgaaagagtggcaccggtcaaaattggcgacatggtcggcgggttatgctgcggaggtcatgcgtgccttctgcctcgatatttttccctctctgggacaacgttctatatcgacgataaagccacttgaactgcttactgtgctgcgcaagattgaagcgcgtggagcgctggataaaatgcgcaaggtcaggcagcgctgcggtgaggtttttcgctatgccatcgcgacggggcgtgctgaatacaatccggccgccgatctttccagtgtgttacctggacccaataccacccattatcctttcttgactgtcgatgaactccccgatttcttgacggcccttgaagggtactctggcagcttgttagggaagttggcgacgaagctactgatgttaaccggagtcaggggcgccgagctgcgcatggcgcagtggcaggagattgatctggataatgcgctttgggagatcccttcggcgcgcatgaagatgcggcgtgctcatcttgtgccgttgtcgacgcaggcggtagccatcctgaacgagctaaaagcctataccggccattatcgcttcgttttccctggacgggcggacgtgaataagccgatgagcgatgcgtgtatcaaccagctcctcaaacgtattggctatcatggtcgtctcaccggccacggcttcaggcacatgatgtccaccattttacatgagcaggacttcaatagcgcctggatagagatgcagctcgcccacgtagacaagaacgccattcgtggcacttacaaccatgcccagtaccttgagaagcgtcgtgacatgttgcagtggtacgccgattttatcgcgagccttgctcgccagtctcaccgccaataaatcgctaaaacccccctggcgcgcaatgctacccccgcctcgcctgcgcgctttctgtgtcgcttttcatgcacccgcatgagaggccgcaggccgcgccagtacgggggcggcgggggataaaacacgcatcttcccgcatgcaaaatcatgcaccctatgcatgcacgcacaatttgacaccggctagccagaaaaaaagccctttttgatgaaggggatgggatgttttgcgtctggcgttgccgggcgtcaccgcaatccggtggccgaaggttgtttctgacgcgggggagatgtgctgcgcgctgacgataatcacatcagagtgtttttagttttattactcactcttcatactattcaccaaaataaaaaagtatagacaaatcagcaggtagcggggtgaagggtgtcacttgtatccattcacccggtgttcacgtctgttcaccgggcttccgcgagaccttttccctggcgagccggtgtttggcggtttttccctattaatcaaccgcccattcatcgctcaggcttttcggccgatttgccaacaacggtcaataaatgccaataaaggccaatatcggccaacgttgtccacttgattgaaaaacaatcataaaatctgttccaccacacaacaacgccttgttgccaccccggtaaaacttcacataatagggcgctaccgaagttcacacagtcccggccagcgttggccggacaccaagaggtagcgtttttatgttgaccgtttccacccccaccccatccaccccgtcgccggttattcctggcggttacaccccgcgcgagcgctttatccgcctgccggaagtgctttacaccactggcctgtcccgctccaccgtgtacgagatgatgagccgcaggcagtttccggtacaagtttccctcggcggtaaaaatgtcgcctggctggcctccgaggtcgagcagtggatggacgaacgtatcgccaaccgtcaccaggggagcgctgagtgatgcagttaaccctcggtcgacactgttttaccctgagcggcaacgacgctttgtttgtggccgaagccatcttgttgcagcgtaagcacccggatatcgtcttgcctgaacatcgcagtgaaaaacacggtgtgatttgcctgacgaaccggcaggcagagttgcgtcgtatctgtgctgatgaagatggctataatgcgatcgattgaacgtccgggggcgtcttacggcttgccctcctgtccgaccttgcgctatagtcttcccgctgccgcaaaatcggcagccgggcgtgagaacccgtgtttaactatggcgacacaacacgcgccacgcgtgttttttatgtcgcagccttagtgcgctcattttttgcgcggtggatgttatgctaccgcagcagtcaatcaatggtggctcaggcggggcagccttcgggctggccggtttacatagttaccggtttctcacccccgtctgggctaccacccttgcgtgagaacttcggtggtagctgttatcagctaactatggaggctgccgttatggcgacgaccctcaccccgactcacccgacattctgctttttgtttgcggccgtgcgccgttttgcgctgacggcgtcaccgcgcatcgtacgtaccgtggcggatagcgaacgcaacgcccgccgcctgctggcccgtgattacgtgttgtcctttgccggtcgtctgccggttaaggcggcagcatgaacaccctggccgaccgttattaccgcgacacccattaccctatcccgcacgccgattttctgcgtctccagcatgcgcacgccaccggcgtgctgttcctcgacctgctggacaccctcgacctcggcgggcagcgccccgacgccgtgcaacaagcatcgtttgcctcggtcattgccctgctgaccgaccagctcggccacgtcgtcaacacctgtgaatcccaaatccttgcccgcatggaggccaccgccgcatgaacactgcatcctgtttaccgattgaagtccgtaccgccgttttccgccgcgccgtggcgcaggcctacctggatacctgtgccttttaccgggtgagcctcgggtacacgctggacgagctgcagatgacgattgccctgcgtctggaagggcattttgtgcgtcagtacggcgcagaggacggcatggacatggcgtgcacgatgctgagcgacatggtgcagccggacgttctggtagctgtgccgcgcctgaccgcgctggggcaaaagatgatggacgaactgtgctgcgagcgcctgtcggcggcacagaacgccaccgtacactgaggagaagagcatgagcgcccagttcgtttcccagaccgtacgcaccgccaccggccactggccggtgatactcccggccctcggcattgccttgcagccgaacggcaagccgcagccgtgtccaacctgtggcggtaaagaccgtttccgtttcgacaaccaggacgggcgcggcacttggttctgcaatcagtgcggggccggtgacggcctcaacctggtggaaaaagccctgtcgctgtcagcaaaggctgctgccgaacaggtggccgccgtgatggggagtaacaccaacgctctgtcaccggccgctgagaccgctcattcaccacaagacaaagccaaggcccagcacaaggccgcgcgacaggcacaggctctggtggccgccgctcaatgcaaaagcggcaacgcctacctgagcgccaagggctggccggaggtggacaccctgaccttgcagggccagtcgctgcgcgtcggcggtatcaccttccagcccggcgaactcttgctgccgctgtacaatgccgggggagaagtggttaacgtgcagctgattaacgccgccggtgacaagcgcatgctggcaggcgggcaggtgaaagccgcctgccacattctgaacggcccggacaacgcggttatctggctcaccgaaggctacgccaccggcctcaccgtgcaccgcctgaccggtgagacggtgtgcgtggcgctcagcgccaataacctgacggccgtggcgcagcaactgcgcagccactacccggatgcacggctgctgctggcggccgataatgaccgcagcggcaccgggcagacccgcgccgccgaggcggccacacgcaccggcggtatcccggcgttgccgcccacggagggcgactggaacgatatttactgccagcaaggcgctgaggtcacgcgcgcaaagctccaggcgctcagccagccgccgcagccgagcccgtttgacacgctgagtgatgcagacctcaaagccatgagcgccagcgagaaagccgagttgctggccgaacactacggcaataccctggcggtgccgccggtgggggaagagctgtgccgctatacgcgcggcgcctggcaggtgctgccacaccggcaactgagccgggagattgccgcgctgttccagaaggtgcgtgcgccgttctccgctgcgggtatcaacagcatcctggataccctcaagctgatggtgccgcagatgggcgacccggcccgccggttgataggctttcgtaacggggtgtttgataccgttagcgggcagttcagcgcccaccggcaagagcactggctgcgcacggtcaacagcgtggactacacgccgccgcgcgccggggagaacctggccgaccatgcgccgcacttctggcagtggctgacgcgggccgccgggggcaatcacgacaagcaggagcgcattctcgcggcgctctttatggtgctggccaaccgctacgactggcagctgttccttgaagtgaccggcccgggcggcagcggcaagagcgtgatggcggccattgcccggctgttggcaggagccgacaacaccacctccgcgaccatcgacaacctggagtcggcgcgcgagcgtgccagcgtggtcggcttctcgctgataattctgcctgaccaggagaagtggagcggtgacggcgcgggcatcaaggccatcaccggcggtgatgcggtcgccatcgacccaaaataccgcgacgcctacgccgcccacatcccggcggtgattttggcggtgaacaacaacccgatgcagttcagcgaccgcagcggcggcgtctcccggcggcgggtgatactcaccttcccggagacgataccgctggccgagcgcgacccgttgctgctggacaaaatcacccaggagctggcggtgattgtgcgtcacctgatgcagcgcttcgccgacccgaacgaggcccgcaccctgctccaggcacagcaaagctcggacgaggcactgaccatcaaacgccaggccgacccgctggtcgatttttgtggttacctgacggtgctgggcaccccggaaggcatgatgatcggtaatgccaacatcaccccgccgaatccacgccgctacctgtatcacgcctacctgtcgtttatggccgcacggggctatcagcacgtgatgaacctgacggcgttcggtttggcggtgccgcagacgttgaaagagtatgagcatacgctgctcaaacgccgcaccaagctgggtatccagaccaacctgcggctgaatgatgactgtgacgtcgactggctgccaaaatgcgaggcgtaacaggcccaatgcacccagacgatcggccgcgccgatcaatggtgtcgtattgatctgcgtaacccattggacggtcacgcatcacgcaacctatagtgaggaggaataaacgttccgccacaccagggcattcattcgggcagcgtctggctgccatcctcataacgacaagcgctccccccccaaccggcttcggccggttttttcattttggctcgatgttgatacttcactgacgggtcagccagggggaagaggccgtgccgaaaccccctctgtgacacaggggtttttcacggatctttttcgaaacaaaggcacgtttagcaactgacggccccacggttcagacttatcctttcgcgttttctttctttatggttgaaaatatcgtcgtttttggggttttattattttttatcgcgaggtggcatgagccagcggaagtatttgacgcagtccgaagtggagcgtttgttgcaacaggctttggcagggggaaatgccgagcgcgattattgcttgatttacatgagttttatccacggtttccgcgtcagcgaggcgtgcaaactgcgcctgtccgatttggatttgcgggggcgctgtctgtatatccggcgaataaaaaacgggttttccaccaaccatccattgctgaaggacgagttgcgggccatcaaggcctggctggtggtacggcggcgtttgccgggcgctgacagcgactggttgttcctgtcgcgtcaggggaacccgctgacgcgacagcgtgtgtaccaaatcatcagtcagttgggcaaggaggccgatatctccgtggagtcacacccacacatgctgcgccatgcctgtggatttgcgttggctgaccggggcattgatacgcgattgatacaagactacctggggcataagaatattcggcataccgtgcggtacacagcgagtaatgcagaacggttcgaaggggtatggcatcgcccaaaaaataagcgaaaaagtagacagttaggaccaaactgtaaagtagtatatgtaaatcgttaaaaaaaaccacaacccttcaagaaaaaagttcaataaatttactatctgtttgtaatttaatataaaaaacttttcaatgcggccttttgggagccgttctctgcattccttaccgcgcttcccgctccttccgtcaggcgacgataaagcgacgagtggatcgccgccccgccaaaatgttctttaatgccgacaaaggcatttattttagccaatccctcctaaatatctctttaaggcagtcactttccccacagttgtcaaaatggtcctaaatgtaaagttcggtgtgcaaagattgctcgttttgcaggtcttaacggggcccgcctggggtgtctgaaaacgttcatggcaggaatgtttttcagtgcgcttttaatattccttgaatagagcggccacggttcgttgacctgtttgaaatggagtttgaagctggcgaatatttttcgatgaagatgtgatgatgtgcaattaaggggatttgtctgttttaggtttctgatattgacggtacttaaatctgaaaaattacgctttggctgtgtttcacaaatgtgcggtcggtgttttttgttgtcgtaaattgaaattaaatggaatttgattggctgccgcttcctttatcttatgggggttgaacgtggcggtcattcagatgaagaagcagtttgtaaataaaaaatggtgttttttactcacgcaggaaatcaatgttatgaaaacttctatctctaaattggctgtggttgcggtattgggtctgacttctctgggggcgtcagcagcaggtaactccggtaaggtcaccttcagcggtgaagtggtggatgcgccatgcaacctggcaccaggccaggatgggaccgatatcaaggtgccatttggtcagctgtccatgtcccaactgaatgccggccatgtggccgcgcagaagttcgatattcagctccaggactgtgatttggctggcaagacggcacagatcacctttaccggtacgacgctgtcaggcagtaccaccttgctggaaacccagggcggtgcgacgggtctgggtatcggtctgtcaggtatcacctttggtactgccaagccgttgacgggtctgaaagacactggcaataacacgctgacctataccgcgacggcgcagcgtgctgttgctggtaccgacgtgactgccggtgattttgctgccatcaccaacttccagatttcctaccagtaatcgctgcgcgtacccccggcagtcctgccggggggaattcgggacgagggggaagggaagatgaaaagatggctgtatatgtggatgtcgctgtttttctctctgccggtattggcagaaacctattcaagtttagatccgtttcgtggcaaggccacgatgagtggcgaggtcctggcaacgggctgctccatcgccttgcctgaccgttatcagacggtttccctgggtgagcagccgatacgttcgctggggcaggcaaaggggggtcaggtcaaggcctttcatatccgtctggacaattgtgcgccgtcaggctcggttgataaacgcaaggacattgatccggccgtacgtatccgctttgacggcctgcgaggggaaaacgcggcctggtttcaaccggcgggctccagtcgcggtatggcgctggtgttgagggatgagcgtaatgaggtgctctatccaggggaatattcactggctatttttgaccgtagccacaatcaacaaatgctgaatttcacgctggagtgggtgcctgatggtaatccacctcgtgcgggggattattacgctgcactgcgtttcaatgtggattatgaatgacgtgggaaatatatcgatgtcgatggtgcaagtcatgattattttcttcttgggtcggtacgtaatcaatattgaataattgcgcgagctgaaactgcgcgggtggatggtggcagggcggttaatgccgggttatgaaatgcattctggtggcggattatgaatcagcgtgaattacgtttaaataaaataacgattttaatcagtcttgttatcctcttttctggtcgtgcgtctgccgtggaatttaatactgacgtactggacacggatgacaagaagaatatcgatttttcccggttttcccgtgaagggtatatccttcccgggacgtatcagatgcaggtgaaactgaacggcgacagtctgggtaatgatattgccgtgccgttttatgtgcgtccagggcaaacgtcttcgacggataagtccgaagcgatgccggaagcctgtttatcgccaatctggctcgacaagctggggttgacggaagaggccctgaaaaaagtggggacctggcatcagggcgggtgtgcggatttcacggcactgaaaggcactgagttaaaagccgatattggcagcaacatcctcaatatcaacatgccgcaggcatggttggagtattcggacgcgtcctggttgcctccgtcacgctgggataacggtattccgggcatattgctggattacaacgccaacggcaacgtaacgaaaacccgcggtagcgatcagcaacaaaacgcggctgtcagtggcacggtgggcgggaatgctggtgcatggcgtttgcgggcggattatcagggcagttatgccaacaccacgggccagaacggttcatcgcaacacacattcgattttacacgggtgtatctgtatcggccactgccttctttgcaggcgaaattgacgctgggtgaagattacgtgagctccaacatcttcgattcctggcgctataccggtgccagcctggccagcgacgacaacatgctgccaccgaagctgcgagggtatgcgccggaaatcatcggcgtggccaagaccaatgcccgggtgacggtcacgcagcaggggcgcgtggtgtacgacagcaccgtgccggccggtccgttccgtattcagaacctggacagcgccgttcgcgggcagttggatgtaaaagtgaccgagcagaacggcgacgtgcagaccttcagcgtgtccacggcgtctgtaccgtacctgacgcgacccggccaggtgcgttatcagctggtcaccggccggccgagtacctgggggcatgatattgaagggcccgtgtttgccaatggtgaggcgtcatgggggatttccaacagctggtcgctgtatggcggcagtacgctgtcggatgattaccaggcgctggcgctgggggtcgggcgcgacctgtttgcgttcggtacggtggccctggatgtcacgcagtctctcgcgaaattccccgaccaggataaccgtcagggcaaatcctggcgcgtcagttattccaagcgttttgacgaggccaatactgatgtgaccttcgcgggttatcgcttctccgagcgcgactatctgagtatgcagcagtacctggatgtgcgttatcacgataatgacagcggccagcaaaaagagcggtaccaaatcagcctcaacaagcgctttgacgaactgtcgttgccgttatctctggggctcaactaccagtaccagacctattgggaccagggaaacaccagtcagtacggcgtgaatctggggacctggtttgacttgccttccctgggggcgcgcaatgtgtcgctgacgttgacggcgaaccgcaatcagtatctggggcgtgaagacaacgtcttcaacctgatgttgtcggtgccgttcggcaccgggacggccagctacagcagtacgtacagtgatgaccggtttggtcagcgcgtggggtactacggccgcgtcaatcagctcgacagctacaacctgaatgccggcctggcgcaggatagcggccaatcgtcgcgcagtgaattcaatggcatgtatacccataacggcccgcgtgcggtggtcaatgccaatgtggccgtggccgagcgcagttattcctcgtttggcatgagtgccaacggcggtctgacgctgactgctcaaggggcggcactgcatgccggtggttataacggcagtacgcgtctgatggtggataccgatggggtcagcggcgtgccgattgatggcgggcgtgtggtgaccaatgactggggggtcggcgtgctgaccaatgtgaacagttactaccgtacgaccgcccgggttgatgtcaacaagatggcggacgatgtggaagcaacgcagggggtggttgagaccgcgttgacggaaggggccattggttatcgccgcttcgaagtactgaagggtgagcgcctgtttgcggtgctgcggttggcggacggcacatacccgccgtttggtgccagcgtccgtgatgccaagggaagggaactggggcttgtggcagacagtggtctggcttggctcagtggtgtgacgcctgacgctgcgctcgatgtggcatgggacggtcgcagtcgttgccaggtgcaggtgcctgcacaattgaacagtcagcagcagttgctgctgccgtgcacggcggtaaaaccgtaatgaagaggggcggttgccgccgcccccgaacaagaagacagggcaagagcatgatgaaaatgaaaaaagtgacgtgggcgttggtgggaatattggcggcgatcacgccggcgacgcaggccgctgtggccctggaccggacccgcgcggtctttaacggggacggtaagtccatcagcctgaatatcagcaacgacaacaaacaattgccttatctggcgcaggcctggctggaagatgcaaagcagcagaaggtgacgcagggggcgttggtggtgacgccgccggtacagcggctggagccaggcgcgaagagcatgctgcgtgtgtcggctacgccggcggcggcgcagctgccgcaggacagggagacgctgttttacttcaatctgcgagaaatcccgccgcgcagtgacaagcccaatgtgctgcagattgcgctacagaccaaaatcaagctgttctatcggccgaaggccattgtagcagcgccgggcacggtgtggcaggaccagttggtgttgcacgaagaagggaatggttaccgcatcgagaaccccacaccgtactacatcaccgtcatcgggatcgggaatacgccgaagcaatctgaaagtggggcgtttgaggtggtgatggtggcgccgaaaagcagcgcgcaggtgaaaagcgcacgttacgccacgccttacctgacttatatcaacgattacggcggtcgccctgttctgacgttcacctgtaccggtgggcgttgcagcgcgaagaaggcgtgaccaaaagtcagtgacgaggagaggcttatatgggcagaaaataccgaatgagtacgctgttgtgcctggtgttggcgggcggtgcctacgccgaagtgaatacgccgcgcgtgccggattacacgctgccgcatgagcccacgccaccgggagaggtgctgtcgcgtgaaggtgtgttgtgggtcgagggggccatgctgtcgtcgccgtgcacctcgggcagcgtgatggcgggcagtctgcaagacggcgtggtgaaaacgcagctgcagtcggtggtcgtgctgctggaagggtgtggcgatggcgtaaacgggagtggggcgcgattgccggtgaccgttgacgtcactgcgggagagtcgttgcaggtgaaacaaccccatccctatcgcctggcacacgggaatagcatgctgcctgtgacggttctgccgggtacgcaggtactgcgtgtggagatgaattatgaataagcaaggatgttggctggcactggcactggcgctgctcggtgctgtggtggggaccggcccggtgtcggcggtcgacctgaatttttcgggaaccctgatagacaagcagtgcacgttcgctcagggggatgacccgctggaagtggacatgctgtcacgggcagtgtcgttctttcatcggtatccgcgtacggaaaccgtgccgtttgacatcgtgctgaagaattgcaccggtgccacgcaggacaagctggtgatgatgaccttcagcgggacgcagaccgaggcggttggtggggtgacgctgctgaaaacggatgggggtaccggcatccttatcggactggaaggtgcgtcggggcaggccatttcggtaggcagtccggtcaatgccggcaccattacgcaaacgggcgcggcgggtgaaaaccggttccggtttggggcttacgctcaggggccggcggacctgtcgacgctggcggaaggggcgtacaccgcgacaaccacctttgaggtgacctatcagtgagtcacggagagagggaatgagagtcattgtgatggtgttctcgatgatagtgggggccgtgctggttgggttgttgttgatggcgacactgtttctttcgggggcggcacatgcgtcggagaacgtgccggcactgttgcgctacgcccagcagtacgatgggggtaataggggagtactttcctcgcctgccaatcaatcgcaccaggctgtgcaggagctgcagcatcgacagcttacagcccgcgtaaaggcgctgactgcgcaactggccgagaaagacaagcagttggcggctttgcgcgacaagcagcaggtttcaggtgacgaggcgcaggggctggtgaagatgctgacgacccaactagcggacaaagacgccttgttgaccgcaatacaggagaagcaacaggttgccttgacgacggaggctgcccgggtgagggcgctgaccacggagctggcagaaaaggataagcggctggatgacctggcgaaacaactgcctgccccggtgaacctggactcggcagcggcccgtgaggcctatgccacgggcgtgctgtttgggcgagacgtgcagacggcccgggacgccaatcagcaaatgggcctgaaactggacgataccttgctgctggccgggctgacggatgcactgaccggtaaacccaagatggaggaaggggcactggcgatggcgcaggaggacgcgcgcaaggcagcggagaaagcactggtctcgaccgtggcaacgcagagaaaggcggatgcggcctgggtagggcgtttcgcgaaacagaaaggggtcgtgaaggcgcctgaaggctattggtatcgggtggagcatgaaggcgatggtatgcgcctgaatgcgaatgacacggtagctctggtggtgacggaaacgctggcggacggcacggtggtgagcgacatggaaggcgcagggggctcgttgatggatacggtatcggctttgcctccggcgtttgcgggggcgctaggtgccctgaagaaccacggttcactgaccctggtggtgccgcccgagctggcctatggcgacaagggatatcccccgaaagtgccgccaggcgcgacgatggtctacaagctgcgggtggcggatgtgattgcggcacccgatgagaagaagaggaaaccgtgatgagacgaccgatatttttgctggctgcgttgctgtggtgcggccaaaccctggcagatgcgactattacgataaaggggaccattctggagccggtgtgtacggtgacgggtgaggatgacggcagcgcggtggatatcagttttggggaagtgagcttggatacggtggggagtgcggcggccgagcaacccatcaatctgaaagtgagttgtgacaacccggccccgacggggaaagcgttgaagatgtatgtgcacccgaccagcaatggcaagctgacggcggtgggggccaatgttctggggacatcccagagcaatctgggcattgccttgaccgccggcactgacggtacgacgccggtggatctggacacgtggatccccgtggtgggtgtcaatacggatgtggatgagccggtcggacaggtgacgttgaaagcgcgcctggtgacaccgtctgcgggttcattgcaggcgggaacatttactgcggcggcgaatctggtaatgagttaccagtaggaccacgactgcagtacgagatgaacaatgactagcccttccatgagggaaagcagaacgaggcgttatgaataacaacgtatggaagatggccgtattgatactggcaccctggctggccgggtgcagccaaacggctagtgagatgccggcgtcgctggttacgccgatggcgagtgaacagaagcctgttgaaatcgctgaccccctcccggtgccggtggctgaaatagtcccggccaatggagagggcgatgccgaagcgcgcatgcgtcactgcaatggcgagttgcaggtgctccgcaaggtggataacaagcgttatgcagaacggaaagtggagtttgaccgattgatgtcgggtgcggcgatgtatgcgggtgtgcgtgggagcgtgcagtcccggacgcaagacgcggtggatgcgctgtatcgctaccggacggatcggctgtgcgcggatatcgggcaggatgtgctgaatgggctggtgaaagctgggcgaggtttatgagtcttgaggaattgcgggaaggggcttatatgaatagcaaagtatggaagatagtcgcaatgatactggtaccttgaatggtccaaatttacttaatagcaccctttgaggttagatttatgggggtgaatatatggtggataaagtatgagattattgttaatggttgttttgttgttgcagtattcagattgttggtcagagtcatgggttcaggttacttcaacgacgaaaattcccggctcaagtttatatgatttttcttacgattattcatggccctatgaaagcagtgatgctgttgtggatttgtgtcggacggggtgtattgttcatcccttctatgtaggcggtcagatttacgttgaacaaggcctagctataaaggcgagtgacaattgctataatatgaaatgcattcgggataaatgggtggcgaaatatggtgttggtggtgccggacatttgagtacttcacaagcaggggcaagaacttcatgctggtcctatgtggcctttccattctcgggagcatatcccacaggcgctgctatttcgcttcccggagcatcttgtgggattgctccgcctccaggtgtggagtgtaatatatcgttacaggacattgaccatggtgtattgaaaccttcggctataaatggttctacaaagagtgaaacaggacaattgatatgtaatgctgatgttacagcgaagctaaccttggggtctggagatagtgttcgcttgtattccaatggggtcaatattatagactctgaactttacattaatgatgttaaagtaggtggtgataaatcggtgacaattactgcaactaatggcattaccccaataattataaaaagtgtgctgcatagtgtgtcttcacctatggggggggaatttagtggtagtgatgtgattttaatgtcaatatattagttgaggttggtttgagagggggcaggatcgcaacactgacgtttacttacgaatgagttaattaatggtgtctgtaatgtcttatttgataagaaatgacgctttttttatggtttttcctcgatgtcaatgtaggtagttatgctttggtcttttatttctattaaaaagtcgtttaagcttgtggcgttaattgttgttggcgttgttgggttttattcgcctttctcgttttcttactattttgttcaggagtcgagaaacaatctgcacgattggaatcttccatccaatcgtgtggagctagcacccggggaaggagggaaaaatctatcaattcaattggatgttaggggcgacttttatagttacaaagaatacgtcacttgtgttgctgggtgcagtgatggtacgcgttattcaactccttatatcgaaaatgatccatggagaatgggggttgctatgattgcaccgtttaccattacagctagcggaggtgggcgctcagccacgttcaacattaatggcgtatcatcgggtgggcgtaattatattgggagtggcggcagtgctggtgacgtcaggggtatgtattttaccgatggcgttgcttatcactccagcccctggatcggctcatttcagacctcggtagatgcgacttacatatggcataacgaaacttacggcgggaatattaacttgagtgctcccgcaggaacgccagccggaacctatacctataacggtacattggctcaatttaatcttcagtattgtggtacgtcgtgcagtccatcatttagccagggcacatattggcaccctttcaacacaaccgtgtatatcacggtgctgggtaaatgtgcattctctaacgcctcaatgatgcttgattactcaagtttaagtcctaaggcagcgaatgggagcgagaaaaaatcgacgactcaactgacgtgtaattccgatgtgagctccggtacgcttaaattggtctccacgtctggcagtaatcaaacctcaacgacgggtacttccgttaaagtcggggataatatggatgctattgtcaccgttaatgggaaggacgcatcgggtggtattgcacttcaggggccgttcaatattcctatcgaagtggcgtcgacactcaatacgtatggcaatatacctaagcccggggcatttcagggaagtgcagttttgagttttgaacctgattaaaattggttggttttttgtgtggctttccctttgtcaaaatttgttttggtgtcttcgctgcttttattgctcggtaatgcgtctttctttttctgaaaattgagcctggatttttagggattaaatcatttaatgagagggtctggatatgtcacgggaaaatgccaataaagaaaacatgggcgcccaattcactgctggagaaaagaaacgtattgccccccgtcaatccaatcatgaagaatatacgttacccgactgcctgacaaaatatcccccgatgccactgtatttggcggtggcgcactttggactgttgacgcaacaaatattatcgagagaggtgatttgccaggcctttcatattgacacgcgccgggcattggaagtcatgcgatatctcgtcaatggcgcaccgcgcgtcacctgcgaatgcctctcactgatacagcgacgggggtattgtctgcgcgtgctgagtattgcgtcagttgagtcggccgccgaaaacgcgtcatcaccctcctctcgcacgcctgcccgcaagcggggaagcacgcttgagcgggagcgcgcgcagcatcaggtacgccagtggtttctgcgccggcccaatccctgattggagacttggtagcgcaatatgtgggtcaacaggagaggtgagatggaagacgcgacgatgggagcgtgggtatggatgtgggtgctgtggctgagtctcagcgcgttgctgttgggagggatgctttcattaccaccgaaagaggttattgagcctcgccctgtcaggcgtccgccttgtctgtggcgttttgtgcgcggcgatatggcggtgggcggtaccgtgcgtatcggtctgagtttggggggcgctggatggtggtgcggtgcggccggcctgttggtgtcggacctatctcgcagcctgttggtggtcggagcgggcgctctggtgctgatagcgctgttcaatgccgggcggcggggggcgcagtccctcgtgggattggccgttctgtctggttttcagggggcgggatgggtcgtactgctgctgattgtgcttcagctctacgggttgtcggtgcgatgagaaaagagggtcgggacaatggcagtgagcacaggcagtgagtgtttcaggggcaaggttgcaaccgctccccgcggtcgtgtctcggcccctctgtcgatagcggttgttgatgcgtgtcagttcgggcttattgggttgcacagcttgttgacccttcccgcgctttcaccgacagcgatagctgtcagtgctcatgagcaggtagaaagcgcgctggttgctgtacaccctggacaggcatgcatggggtatggcggtggggaacggtgtctggttttgcggctgtcggcgcatccggtacaggccttgcagcagttgttatgtctggaacacggactgatggtgcgagcgggctttcggcgcttgattgttctttcaccgttcggggtcaataacgctgtccggcaggtgctggtctgtggcggggtgcgcctaccggtacgcattgtggatgcacgcagcccggtaatgtggttgcgtcgcgtggtgttgtcgcagggttccttgtcgcaggccggggaggatgaattgttgccccagatgccggcgttgatattgtccgaccccgagcgtcgggttcttgtcaggacattaatggaaatctccattcaccagcaggcgcgattacagcaccgcaacaacaagacgttgtacgcacagcggcacaatgcgttgcgaaaactccgcgcatccggggtggcaggcctgttgcggcgatttgtttcgatgtgaaggcatgaggcgttcagtgatgtggaggtgggtaatgcgaagaaggcagcgagggcggcgacattatgcacttgaacaagcggactattttcgggagcggatattgaaacgcgtggtgttgtgggtgcttttgccacttctggctgcgctgttggtggtgttatggaggacagggtgatgtggaagcgtgcaggggaagagaaaggaggcagtggacagcaaccggagttgcatgtcatgtcgacgcccgtcgagcgtttgcgcgcaacgttgcagaaggcggcggcgttggagcgggcggggtgttttgaagatgcggcagcctgctggctggcggggtttgaattggcccggcaagggaatgagcggcactggtgtgaagtgcgggcgctgctgtgtcaaaagcgaagcgcggaaccacgacgttaatcgtgcggacccgtcagcgtgtgccgcgggcacctcagcaagtgcaaaaaatttcgcctggacagccgtggttatctggctgtttctcggggctatggtggtgatgttttggtctgggcgtggtgtggggcgctggctgtcccggctggggcatggcgtgataagtggattgatgtaggcggcagaatcttcggtaagggggaaagatgcaaagatgtcggcaacggcatgtctatgtccgaaggttgcggatgatggggcgtcgtatggtgtggctgggtgtggtgacgataagcatggtgatatgggggctgttgctcggacttatcgtatggctggagtggtgagacgtggtccttccggcagtgacgccagtaggccagcgcaatcaaagtaataaacagcgcattgaacgacagccagataaacacgatgaccatcactgttcccatgaaatcatttcctcaacgttaaacgggggagtccatcaggtgcgaggcgggctcggtgtgatggtgttcatggagtgacattattatcgggaggattaataagtaaaggtgatgtttttggtgtgttgtggatagtgatagagcgcacgttaattgatgggaaaatacagggtggtgctattttgggcgagttagtgattaaaaaggcatcgctagaaaaggtattcaacgcgaggtggcaaaatgaaatcagtaatattgttaagtttttttgttgttttttcgggggcggtctcgcccatgagttatgcacaagattagggtgcagcgtttcatgtggctgcgggggtggcgacagaaccggcctatgtcgggtcatcgcattatgtcgcgcagccggtctatgacgcagccggcagttatcgcaacgccacatggggcacgtttgagctcggtgttttgcagggtgctcgctggcaattgccgttgtcgtcgccactgggtgtggcgttactgatggcttacgatgccggtcgtgacgagcgcatacgtacgcttggcggccacaatacgcagttgcgcggtatgggggacttagggggagcattggaggccggtgccgagttgagttatcagtttgcgccggcacgggtttatgtcaaggggatgcaggcactgcgttcgcgcgactacggcgatgaggcgcttgggcatacggcctatgtggatctggggggggatggtgagcatgccctcgacgagcaatggacgctgagcagcaagttttacgcgacctgggctaatggcgggtatcaacgcgggtattttggcgtgacgccggcgcaagcggctcgaacggactttgaggcttatcatcccaaatccggcatcaggcaggtgacggcagaagcagcattgaactaccagtggacatccaacgtggcattacaagggggcgtggaagtgtatcggctgaccggtgatgcggtggacagcccattggtggagaagagcctggccggtatggcgtttctgagtgccagttatcaattttaagcgagaaaccacatgtcccgtgcttcgataatggtcgatgccacgggtaacgtaataaggtatggcgttgcaactgacgtcaatgccaaatcccggtggccatttccaataggaggcgtaaatgtcggtgtgatggccaaagactgcttgcgaggtgtgttatgcgtatatttttgggttttatgatggcgggctcaatcctgcttttgtcggcttgtgctgagaaaccgcaggtgaccgccgattacgatcatggcgtcaatttcagtcagtatcacacctacggttttgctgccaaagaagagaagtaccaaacgctgacggatgagtacattcgtctgtctgttgctcaggaaatgcagcgacgaggttatacactcagcgccagtcccgacctcttgatttattggcatgcttctacacagaactaagtgcagatggatgatgagccctctctaattggccgtgtcgggtacgctggctgggcagggtataatcaaagcctatggacgtataccgagggcatgttgacagtggatctggttgacaggaataagcgccaactggtgtggcgcgcgacagccagccatgtcctggatgcggataaggcggtgagtcaggaagatatcgggcaaacggttacggctttattttcggcctatccggttccgggggctgagtaaacgccgttatagcgagggccaaatgctgcgaataaggtttatgtatgtgatgggcattattgtttgtggcgaatgttttccgaaagacaggggtatcattaaaaatatttgactttgcacgcctcccgtgaggaggattaatgcatcccttggggatgatgtgaaatgtgtattccttttgccagacttccctgttggtcaccccacaatatcggggtgacattttttctacttcttcgctgatgctttttgctgtttcaataatgtataaatggaatgggtgaatgaccaaggtaatgataatcggattactgttgttttctgcggtttttattggcctgtgtatttattttcaggataaagagggcaccatgtttgataaattgagtcaacaacgccaatctgtcggcagtggtgtatttactgcgggtgattataaacctgggcttttaaagcatgtcgtgctgtttaaatataaaaagactgtcacgcaagcccagcgggatgcggtgacgagtcggtttttatcgctcaagcgatcaatgcgaccgggggcggatgcgccttatattctctctattgttgaaggtgtgcaaaatagtggggaaggggtggatggcggatttgaacaggggtttatcgtgacgttcaagtctgaaggtgaccgcaattattacgtgggcaaacccctagtagatactgagggggattacgatgaggcccatgacgcgttcaagcaatttgtggcccccctgctcagtgacgataacggcgtgctggtgtttgatttttcactgaggtgatgacgtcggtgatgatggtttcatggagaaaacacgatgaacagaatgataacggtccatacctcgcttgaagatactccctttctttttcaatcattgaccggcaaggaagccttgtcatcgctgtatactttccatgtcgacgtgctttgcgaggctcaacctgtcgaccccaaaaaactgctggggcaaaccctgacggtggagtgtcgccaaaccccgctgaccccaccacgctatttgtcgggcatcatgacgcgggttgaggtcaaggggcgggacaaaaacgaccgctatgaccgctatacccttaccgtcaaacccgccttgtggtatctggggcagggacgggattgccggatatggcaagagaaaagcgtgccggacatcatcaccacactcttgcgtgagcagaatattgcgtttgagaaccgcctgagctgggattaccggtgctgggagtactgcgtgcaatatcaggaaagcgacttcgattttatcagtcgcctgatggagcatgaaggtatctattactacttcctgcacgataacgggaaacacacgctggtgctggctgatgcacccgagcagcacgaggtgctcagtggtttcgccaccttcccgtgtattgacgagacggcgagtgatgtctccgagccggggattgcacactggcgggtgtccgagacgatgtccgcgtcgctgtatctgactgacgactatgattttcgccggccgcgtgccagcctgctgcaggcgagacaaaatcccgcacctgacggccagcaagaggctgtcgtgtttgactggccggggcggtatacccggcatgatgacggggcattttacggtcgaattcgccagcaggagcttgcgtgtgcacaggcacagatgtcgggggaaaccccgtcgctgggcatggcaccagggcatgcctttaccctgacgcgggcggcgcgcccggaagataaccggacctatatcgtcagcggtgcagagtattttttcagtgaggccggttattacagtcaggatgacgaagaggcgacaccggtacatcgcacggtctttaccgcccacccggcggccctgagctggcgtccagcccggcaaactgcctggccgcggacatacggcccgcaaacagcggaggtggtggggccacaggggcagaccatctggaccgatgaatacgggcgcatcaaactcaggttccgttgggaccgccataacgcccccggtaatgaccaggcagcctgctgggtgcgtgtgtccagtgcctgggccggatgggggtatggcagtatccaggtaccccgtgtcggcgaagaggttatcgtcgactttatcaacggtgacccggaccgccccatcgtcaccggccgcgtgtataaccaggacagcatgccgccgtgggatttgccggcggatgcgaccaaaatgggcttcatgacgcgttctgcgggcggaacccccgagaacggcagctttttggtgtttgacgatgcaccggggcgtgagacgtttgacatgcacgccgaacgtgacatgagcatgagcactgaacgtgacctgacggtgaatatcgagggggcacggaccacgcgggtgaagggcaaagacagctacacgttcgatgacagccagcgtgtacgtatcgccagggggcggcaggttgatatcgcggcgggtggtgataaccgagaggtcacgggggacagcacgaccactttgcacggcaagcagacggttatcattgacggcgagttggttgaggaataccgggacgggcaaacaaccacagtcaccgccggtggccagacgctaaagatacacgccggtggccaaacgataatcatcagcgaggggggccggtccattgacatcgtcggggatgcaaaaaaaaagataaccggcaacgagcgcgaggacacgacgggggaatggacgaagtcagtgggtggtaccattaacatcctgtccgatgcggatgtgaacattaaaagcgccacgaaaatcacgatggatgcgcccaatcaaaaggctactaccggcaaggggcacagcgaaagctttaccggtcactctttcagcatgacgggtgcatcggaaagctttaccggcagttcggtcagttttaccaactcatcggtcagttttacggcgtcgagtgtttcgatgggcatgttctccatcagtaacacgccgtttaaattatcaaaacatgataaccatcttgaatttgtcagcggtaataaaacgctcaccagcactcttctctctctcaagagtgattacagtgcgtttgtgagcgccctgacgacgattgcgtgaaggggaatggtgtgggtatggtcaatgttgcgttctggtcaaatgtggcccttaccctggcgctaatgctgctggtcatggtggggatttggaacacttgccgagcggcccgaaaaaatcgggtcattatgaagtatggcaaggaaacccgtgcgctgattgtgaatgccacgccgcataagaggcaggttattgtggggaaagtgtcggtgaaattacaactgacttatacggtagatagggtgggatattatgttctgaaggatgtcattgtatcgccctattatatgaatgcatttaaggtcggagatgaagtgctgattcgctatagcgagagatgtccgggcgatattattatagtaggcgaagtgggtaattagcgttgcagtgttgtgaaattagcggtggaggtttttgtctttttaaaattggcttggtgtggctaggtattaatggtgcttaataaataagcgggcgtgaatattcattggttgtggattgcaatttttttgtgactggcaggtgctgcctgtgtttctataagtgaattgatttatcatggtgcattatagtgccgtggctgaaattgttgaaattattatcttaaatatatcaaataaaacaaaatcccttttcaattcaggcgttgctgctaccttcaataccgaaccaatataagactactcctaaatggtgagggtgtgatgaagcgcaaatatctaacaggggaagaaataacaaggttacttaagactatttccatggatatggtttctgttcgtgattattgtatgacaagcatggcgtttttgcatggcctcagggtcagtgagttgacggcgttacgactggcggattacgaccccttgtccaggaagatttatatcgccagactcaaaggtgggatgagtaccagtcatcccttgctgccggaggagaatgcggccttgcaggtgtggcttgctgaacgacagacgttggcggggcaatgtcagccctggttatttttgtcgcgtaggggcaatcgattgtcacggcaagggttttaccagttactgcggcgttatggtgaacgtgccaatttatcgcttccagttcatcctcatatgctcaggcacgcctgtggatataatctcgcagagcgggggaatgatacgcggttaatacaggattaccttgggcatcgcaatattcgacataccgtgctgtatacggcggcgaatgccgcacgctttaatcatgtctggttgaaagatgcggggttaccgctgatgtcgccattacaggaatcgttgccccgcaatgtgctccacaacaccaattaatcgaaacagcttgttcaaggtattgttaaacgggtgcgaggcttcttgatgaacagggggggggcaggaatgaaaaagaaacaggaagccccttgtgttcaggaggcatcatcaccattgggcgaagcgggcgttatcgtgatgcgggggagtgagcacactcctctttataagcgggtggcgctgtggggctggcgtctgggaaagccttttagtcgtcatgatgtggcgaaaacgtttggaataaatctcgacagtgcaggaaatgtgatgtcttacttgcgccgggcgcgccctgacgtggtgaaaagttggcaatggtatgagcggggagcaagaggttcgcgcaagcgttatatgcagatactttcagcgccaaatgttgacggaaagccggtcaggatgatgccggttcatttgttgggtggaaagaaagagggctctgtgcaggatatgcgtcgccgatttattcgaggggcggccgtaggattgggggaggactgaatgcaggtctgtacatgaggagagtctgttggcatggaaggcttgcgtgttgattcagacctttttttcgcaagagacaatggccctgcatcgaaaggtgtagggcagtgaatggtgactacaggggtgttaatcacttatcgcattgatttaaataaataaaaacatttggtgtagagggtgcatagttttaccttaaatcttttttaaatcggtttagataatgatgggtgagtataattttcaatcatttgtttaaatgagctgttagttcgtgcaagtgtgtatatcggtgtgtgtagatttgttttttattttcattttttcattgattattagttggttagattgattttttttattcctattatcagcaccgggtcgatccgcaagtgccgatcgaagacgtcgtcggcacgatggcggatctgatccgcgaaggcaagatccgtcacatcggcctgagcgaggcgtcggtcgccacgctggagcgggcgcacaaggtacatccgatcaccgcgctgcagaccgagtattcgctgtggacgcgcgacgccgagcagggcgtgctggcggcctgcgagcgcctgggcatcggctttgtgccctacagcccgttagggcgcggtttcctcaccggcgctatccggcggccggaggatctggccgaggacgatttccgccgcagtaacccgcgcttccagggggaaaacttcgcccgcaacctggcgctggtggagaaggtgagcgagctggcggcgcagaagggcgtcaagccttctcagttggcgctggcctgggtattggcgcagggcgaacacattgtgccgatccccggcaccaaacgccgtcgctatctggaagagaacgtcgctgcggcggagatcgcgctgagcgcggctgaactggcggcgatagaagcggtgtttccgctgagcgcggcggccggcgatcgctacggcgcggagtcgatgacctacatcaacggttaaaaaaaagcgcggcctgcaggccgcgctctgtcgttttccgccaacggcgaattatttcttcttcggcgcgcgcggcggacggccgacggtcgcctggtacaccttgaagcggccgttttgcgccagcacttcgtggctgccgaaggtggcgtccagaatgtccgggtagggcaggaaggcgttggcgacgatgcgcagttgacccccgatcggcaggtgcttcaccgcgccgcggatcagcgtttcggcggcggtcaggctggtctgcagcccgtcgtggaacggcgggttggagatgatcatgtcgaaacggccggtgatatcggagtaaacgttgctgacgatcacttcgccttcgatgccgttggcggccagcgttgcgcggctggattccaccgcggcggcattgacgtcgctgagggtcagtttcaccttcggcgacagcttggccatcaccgaggccatcacgccggcgccgcagccgatgtccagcaccttgcctttcatgtgtttttccagcgtcgacagcagcagcgagctgccgacgtccagaccgtcgcggctgaacacgcccggcagcgttttaacttccagatcgtgcagctgatagctgtcccaccactcgttcaggtcgaactcggtctgcgcgtccaggcggccgtgatacaggccgcagcggcgcgcgctgtcgattttcaccagcgcaacgtggccttccagcgttggctcggcgctgcgcacgccgctgcggttttcaccgaccacgaacacgtccgcgcccaccggcagcagcgccagcaggttgcacagctggaattgcgcttcctgcttgctcttcggccagtagtaaaccagcgtgtcgcagtcggcgacgaaagcgggatcgacggtcaaaccgaactgcacgttatcgcccatcgtccggttcagtaactgccagtgatggtattgctgagtgtggacgcgcacgtccgcggcctcgaattgggccggcaggctgtcctgcaggtcgccggcaaacagcacgcggcgttcgataaattcatcactgtggcgcagcatgacttcactggcgggggttaatgcagacatcagatattggctcctggaaatgagaccggggattatagagctttgtggcgatatgttcgacgggtttgttggcgcgggctgcgcgggtttgttagcatagcgcggcgcatggcaggcatggcgcaccacaacgggtaggaatcggcatggcatcaaaacgcgactggctgttacaacaactgggtattacgcagtggacattgcgccgcccgggcgtgttgcagggcgaagtggcggtcagtctgccgcccgaggcgcgcctgctggtggtcgcgcagacgctgcccgcacccgacgatccgctgttttgcgacgtgctgcgcagcctggggctgacgccggcgcaaacctacagcctgacgccggaacaggcggcgatgctgcctgcagagaccacatgcaacagttggcggctgggcgtgacggaaccgctcgcggtcgccggcgcgcagctacacagcccggcgctggccgagctttcccaagacgcgggggccaaacgcgccctctggcagcagatttgtcatcatgaacacgatttctaccctgacggcggccgacctggccacagccttcaccattgagcaagccagccacgcctttccctggacggaaaccaccttcgccagcaatcagggcgatcgctaccttaacctgaagctgagcgccgacggggagatggcgggattcgccatcacgcaaatcgtgctggacgaagccacgctgttcaacatcgccattcatccgcagcaccagcgccggggttttggccgcctgttgctcaacgcgttgatcgaacagctggagagccgcggcgtggtcacgctgtggctggaggtgcgcgcctccaaccaggcggcgatcgcgctgtatgaagatctcggtttcaacgaagtcaccgtgcgccgcaattattacccgagcgcccacggccgcgaagacgcgatcgtgatggcgctgccgctggcgtaatctaaaaacatcctattgattgttttcctcccctttaacaactgaaaagttgtttcctgattaatttacatcaaacaagttgtttttcgctgtgacgacaactaatttgttgtttattgttgaggaaacaatcaatgcgttgtttggaggtggggatgagaaaattatcagaaatatcagcgttgctgaaagaaaaacgcattgagttgggctggagccaaaaagactttttgatgaagattggcatgactcaacagcaatatcagcgtgttgaatcgggcagcgatatgcggatgagcacgctgctacggatattggcggcgatggatttggaatatgttatcgtgccgaaaaggtctgtccgtgatgtggagtgcttgctgcaacagactgtgagtcatgcaccagaagtgagtaacttacagaatttcgaagaaaaactgaaagatctcgaggactagcgaatgaaagggctgcgacaggttgaatcggtgcaggcgttagccttgatattgcatggtgtgcgggtgggcgtgctggcgcactacagcggcggcagaaacatcctgacgtttgatccgcactacctcgctttgccggagcctgttcgtcccctgtttacgctaaggcagaaggcgcacgcgggatatcttgagcaagttttacagtcatcgcagcgccttccgcccgtcttatccaatttattgcccgaaggcgcactgcgcagttggttggcccagtcgttgaaaacccatgtgaatgaggagtttcctttacttgcctgggccggggaaaacttgccgggagcgcttgaagcacggccgctggccgccagtgatatccccgcttgggcgttaacgtcgcgcggagagctggaagccgtgcaaattgatgttggagtggcggcgcagaaattttctctggcaggggtacaaatgaaattttcctctgtgcgcaaagagggccgcttcaacatttcttctcaggtgggcgctgatagctggatcattaaaacgccttcaaccgttcatcgtcatctccctgaaaatgaatatacggcaatgcgtttggcgcaagccatcggcgtggatattcctgatattgagctggttgagctgacacggcttgaacacttgcctgatattcgcttggcggatgaaccctatgcgtatgccattcgtcgttttgaccgcagtgaaagtgggcgagtgcatacagaagattttgcccagatattcgagatctatccacacgacaaataccgcggcaaaaattacgatcagatagcggcttatctctatgagtttggcagtgaatctttagcggatacgcagcaaatggcgcgccgtctgttggcgaatattctgctcgccaatggcgatgctcacgtaaaaaattggtccatgatctatccaaaccaggccgatgtgcggcttgctcccgcttatgacatcgtcactacattggcttatatccctggtgagtctgaggttgcgctcaatatggcgaaggaaaaacgctgggataggatctcaatgcgaaccttcgagcgctggtccgatcgagtcgatattccctggcccgcaatacgggtgcatctcttggatgccatcgacaaggcgcgagctttgtggccggcattgttggcggacctgccgatggcggacgatcacaaatcggtattgcgtcggcattgggccgccttgtcccccgatttccgcctgtgttagcgggaaatcggatccattgattgtcaccggttggcaaatcggcgaaaatgcccggctgttatcttttattcaccgctttgcccggcgccgcgatcggcgcgttctgatgatgtcgcagggcggactaaccgtagaacctgaaaaccatgtctcctagtgaatttgcccgcgaagtctccaaaagaagaactttcgccatcatctcgcaccccgatgccggtaaaaccaccattaccgaaaaagtgctgctgttcggacaggcgatccagaccgccggtacggtaaaaggccgcggctccagccagcacgccaaatccgactggatggaaatggaaaagcagcgcgggatctcgatcaccacctcggtgatgcagttcccgtaccgtgacagcctggtcaacctgctggataccccggggcacgaagacttctccgaagatacgtatcgcaccctgaccgcggtcgactgctgtctgatggtgatcgacgccgccaagggcgtagaggatcgcacccgcaagctgatggaagtcacccgcctgcgcgacacgccgatcctgaccttcatgaacaaactggaccgcgacatccgcgatccgatggaagtgatggatgaagttgagcgcgagctgaagatcgcctgctcgcccatcacctggccgatcggctgcggcaagctgttcaagggcgtttaccacctgtacaaggatgaaacctacctgtaccagaccggtaaaggccacaccattcaggaagtgcgcatcgtcaagggcctgaacaacccagagctggatgcggcggtgggcgaagatctggcggcgcagctgcgcgatgagctggagctggtgcagggcgcttctcacgagttcgatcaggaagctttcctgagcggcgagctgacgccggtgttcttcggtaccgcactcggcaacttcggcgtggatcatatgctggacggcctggtggcctgggcgccggcgccgatgccgcgcaaaaccgacacccgcgaagtgacggcggcggaagagaaattcaccggcttcgtgttcaagatccaggccaacatggatccgaagcaccgcgaccgcgtagcctttatgcgcgtggtgtccggccgttatgagaagggcatgaagctgcgccaggtgcgcaccggcaaagacgtggtgatctccgacgcgctgacctttatggccggtgaccgttcgcacgtggaagaagcctacccgggcgacatcattggtctgcacaaccacggcaccattcagatcggcgataccttcacccagggtgaagacatgaagttcaccggcattccgaacttcgcgccggaactgttccgtcgcattcgcctgcgcgatccgctgaagcagaaacagttgctgaaggggctggtgcagctgtccgaagagggcgcggtgcaggtgttccgcccgatcgccaacaacgatctgatcgtcggcgcggtcggcgtgctgcagttcgacgtggtggtggcgcgcttgaagagcgagtacaacgtggaagcgctgtatgagtcggtcaacgtgtcgacggcgcgctgggtcgagtgcgacgacgtgaagaagttcgaagagttcaagcgcaagaacgagatcaacctggcgctggacggtggggacaacctgtcctacatcgcgccgaccatggtgaacctcaacctgacgcaggaacgttatcctgacgtgaccttccgcaagacccgcgaacactgatcaatcggcagggcgcccggtgcgccctgccagttccccgtattctcactccgctaattaataaatcttcctcatattttatcctgcgaatcgatgccgcccaggcgagacgcgattggcctgcgttttccgccacatggtctatctttaacgagatgcccgcacattgcttgagagtaaatcactgcaatacgctgattgtttggtgagttattctgatgtgttgccgataggagacagtctgtttccttaaatatcaatgagatgactgttttaccgtttcgtgtcacttggtctgtcgtcaataggcgacagttttttgattaaaaatccgactcaacgctttttttgtttgatttttaaggtgtttatggagttggcacggcggttgcaatattcctgtcgtgaacgcttaatcgtatagcgatgatgaagtatttaccgagaggccgcgtgaaggcggctgaagggttccggcgctctggcgctggggcccccaacaaaaggaagagatcgatgaaaaagaccaaatttgcacactcgttgatggctgttgttttgggttctgctttggtgagcggcactgcgctggccgaagacagtctgctcaacaaggcgtctaacgccgcggacagtgccggtgccaaaatcgatagctccatgaaaaaagttgacggttacatggatgacagcgcgataacggctaaagttaaaagtgcgttggtggacgataaaaccatcaaaagcactgacatttcggtgaaaaccgaaaaaggcaccgtgatcctgagcgggtttgtcggcagtcaggcgcaggcggagcatgcggttgcggttgccggtaaggtggaaggcgtcaaaaccgtcagcgacaagctgcacgtgaaagatgaagccaaccagtcgatcaaatcgtatgccggcgacaccgccaccaccagcgagctgaaagccaagctgctggccgatgacatcgtgccgtcgcgcaatgtgaaagtggaaaccaccaatggcgtggtgcagctttccggtgaggtgaaaacgcaggcgcagtctgagcgtgccgaaagcatcgccaaggctatcgacggcgtgaaaagcgtgaaaaacgacctggtggtcaagccgtaatcccgccaggcgcccgtaacaagtaacaacaagccgcatctgtcgggccgtgaaggcggcccgacgtgtaccaccaaaaaaagaaactgatttgccgtcgatgtcccgttgtcggggcggtagatggcagcgaattttttcacaatggtaaggagaagcttatgtttcgttggggcattatctttttagtcatcgcgcttatcgctgcggcactggggttcggttcgctggcgggcaccgccgcctgggccgccaaagtcgtgttcgttgtcggcatcatcctgttcctggtcagtctgttcaccggccgtcggcgcccttagccggccggcattttcctgcaaactgtaacaaagcttaattccttttctcacgtcggggagggccggccatgaacagcgacatcatcgtcgggcgctggaaacagctgaaaggtcaggtatggcaggcgtgggccgaatggtccggcagcgatggtgcctggttggccggcagcaatgatttcctcgtcggcgtgctgcaagaggattacggaagagagcgagacgcggtatcctcggagaaaacgtctcactgaggatgccaagttgggatacagaatacccatcacgctcggcaatatagaaccgctggcgtctaaaccttttcgaccaggaaaaatggcgttggtctgcgaaggcggcggccagcgcggcattttcaccgccggcgtgctggacgagttccagcgcgcgggctttaaccctttcgatctgctgatcggcacatcggccggcgctcagaatctgtctgcctacatctgtgggcagatgggctacgcgcgccgggtgatcacccgttacaccacctcggcccagttcttcaatccgctgcgtttcgtgcgcggcgggcatctgatcgatctcgattggctggttgatacggcggcggcgcagatgccgctggcgatggacgtggcggaacagcattttatcgacgggcgcgaattcctgctgtgcgcctgccgcagcgacgatttcgaaccggcctatctgccggcgcagcgcgaacgctggctgccggccatcaaggcgtccagcgccattcccggcttttaccgtcagggcgtggagttggacggcgtcagctatcaggacggcggcatcagcgatgcgatcccagtggaagaggcctaccgccgcggcgccgacaccatcgtggtgatccgcaccgtgccttcgcaaatgtactacaccccacagtggatgaagcgcatggagcactggctgagcgacagcagcctgcagcagatggtgcgcatcctgcagcatcatgagcaaagctatcaccgcatccagcgctttattgagaaaccgccgggcaagctgcgcatcttcgagatcttcccgcctaagccgctggccagcaatgcgctgggcagccgactgggggcgctcaatcaggattatcacctggggcgccgctgcggccgctacttcctggccaccgtcggccagtggatggcgcagcaggaaccggacggtatcaaggtgcaaaaatcgttgtcgcgccgcctgatccagccggagaacgtcagaatgccttcgccgatcgtgaccgacatcgccatgtcgcccgatctcacggcgcagccggaggctgcggtggcggcgccgaaaatcatcctgccgggcgatctgccgccgggtgaagggggcgcgctgtgagctacgcctttaccgacacccactgccatttcgatttcccgccctttaccggacatgaggctgagagcctgacgcgggcggcaagcgccggcgtaaagcgcatcatcgtgccgacggtcaccgccgatcgcttcgcgcgggtgttgcggctggcgcaggagcatgcgccgctgttcgccgcgctggggctgcacccgctgtatatcgcgcagcatcatgagccgcagctggaacagctggcggcgctgttggccgaacggccgcgcaagctggtggcggtgggggagatcgggctcgatctgtatatggacaacccgcagttcgagcgccagcaaagcgtgctgctggcccaactgaggctggcgaaacagcatgacctgccggtgatcctgcactcgcggcgtacccacgatcagctggccgccgcgctgcggcgcatgcagctgccgcgccgcggcgtggtgcacggcttcgccggcagcctgtcgcaggcgcaggcgtttatccgcctcggctattacatcggcgtgggcggcaccatcacctatgagcgggcgcagaaaacgcgcggcgtgatggcgcagctgccgcttgaggcgctgctgctggagacggatgcgccggacatgccgctggccggctatcaggggcggccgaatcgccccgagcgtgccgccgaggtgtttcacgcgctgtgcgagctgcggccggaaccggccgacgagatcgccgcccatctgcaacgcaatacccagtcactgtttgcaatgccggattgacgagcttataacgtgacttgcgtcacgttataagattttcatttgcgtctcgttgtatacatttgtgacataaatcggtgcgagggtgacctcgctcagtataatccccccgaaactctccaatagcagacctctcttcatgagcagggatgtattttattttttgcaacagggaaactttgcatgcaactcatcatgagtctggtcggtatggcggtgctgatcgccattgcggtgctgctctccagcaaccgtcgggccatcaaattgcgcaccgtggtgtgggcgttcatcattcaggtcggcatcggcgcgctggtgctgtacgtgccgctgggccgcagcatcctcggcagtatgtctaacggcgtggcaaacgttatcgcctacggcaatcagggcatttcgttcatcttcggcgggctggtgtccgacaagatgttcgaggtgttcggcggcggtggtttcgtgttcgcgctgcgcgtcctgccggtgatcgtgttcttctcctcgctgattgcggtgctgtactacctcggcatcatgcagttggtgatccgcgtgttgggcggcggcctgcacaagttgctgggcacctcgcgcaccgaatcgctgtcggcgaccgccaacattttcgtcggccagaccgaagcgcctttggtggtgcgcccctatatcgccaccatgagccagtcagaactgttcgccgtgatgtgcggcggcctggcctcggtagccggttcggtgttggcggggtacgcgcagatgggcgtgccgctggaatatctgatagccgcgtccttcatggccgcgccgggcgggctgctgttcgccaagctgatggtgccggaaactgagcagacccacgataaagacgatgcgatgaagctgatcgctgaagaagatcgtccggccaacgtgatcgacgcggcggcttccggcgcggcttccggcatgcagctggcgctgaacgtcggtgcgatgctgctggcgtttatcgcgctgatcgccttgcttaacggcattctcggcggtatcggcggctggttcgattacccgcagctgtcgctcgagctgatcctcggctgggtgttctcgccgatcgccttcctgatcggcgtgccgtggagcgaggcgatgaccgccggttcgttcatcggccagaagatcatcgtcaacgagttcgtcgcctacatgaacttcggcgcctatctgcgcccggatgacgtagtggcggcggaaggcctgcaggtgctgtcgacgcacaccaaggcgatcatttcctttgcgctgtgcggcttcgccaacctctcctcggtggcgatcttgctgggtggtctgggcagcatggcgcccaaccgtcgccacgacatcgcgcgcttcggtctgaaggccgtggcggcgggcacgctgtccaatctgatgagtgccaccatcgccggcttcttcctggcgctgtaagccatcacggagcccgcgacggcgcgaccgatcgcgggactccgcctatactctaagcaacgcgggtgcttgccgcatccgcgatcttcagccgcttctttagcgaatttgtgaacgatatcgcgttattttgtgatgctcttcacatataattccggtctgttacagtgctatttcatatagtgtgacgatgaacgcgaatcgcctccggcattcgtgttcaaatagctattactggccggccgcaaggcgggtggccatgtgcggtgagaaggatctcagttgccgccgcgggaacgccgttccccagcgctatcttcatggaaccaagtccgctcgccaacacccaggtactcagttggagagttttatgaccgaattaaccgcagcagcgcaacgtgcgctgaacttgatggatttaaccacgctgaatgatgatgacaccgacgagaaagtgatcgcgctctgtcgtcaggccaacagcccggccggccacacggcggccatctgcatttacccgcgttttatcccggtggcgcgtaaggcgctgcgcgagcaaggcacgccggacatccgcatcgccaccgtgaccaacttcccgcatggcaatgacgatatcgacatcgcgctggcggaaacccgcgcggcgatcgcctatggcgcggatgaagtggacgtggtgttcccataccgtgcgctgatcgccggcaacgaacaggtcggcttcgagctggtgaaacagtgcaagcaggcttgccaggcggccaacgtgctgttgaaagtgatcatcgaaaccggtgagctgaaacaggccgatttgatccgcaaggcgtccgagatcgccatcaaggccggggctgactttatcaagacttccaccggcaaggtgccggtcaacgccaccctggagagcgccgagctgatgatgtcggtgatccgcgatctgggcgtggcgaagacggtgggcttcaagccggccggcggcgtgcgcaccgcggaagacgcgctgcattatctgcaacttgccgatcgtattctgggcgaggggtgggccgatgcgcggcatttccgctttggcgcttccagcctgttggccagcttgctgaccgcgctgggctaccagacccagaccgccggcggcggctactgatcgatttcgttggcgggcgccaggcgcgcccgtctgcaccgactctcggcgacacagggggatgccttgttcctggctcaagaaattattcgtaagaaacgcgacggccagccgttaagcgaagcggaaatccgctttttcatcaacggtattcgcgacaatgtggtgtcggaagggcagatcgccgcgctggcgatgaccatttatttccatgacatgagcatgccggagcgcgtggcgctcaccatggcgatgcgcgattccggcaccgtgctggactggaagagtttggcgctgaacggcccgatcgtcgacaagcattcgaccggcggcgtgggcgacgtgacctcgctgatgctcggcccgatggtggcggcctgcggcggctatgtgccgatgatctccggccgcggcctgggtcataccggcggcacgctggacaaactggaagccattccgggcttcaatattttcccggacgataacgccttccgtaaaatcattcaggacgtcggcgtggcgatcatcggccagaccagctcgctggcgccggcggacaaacgtttttacgccacccgcgacatcaccgccaccgtggattctatcccgctgatcactgcctccattctggccaagaaactggcggaagggctggatgcgctggtgatggacgtgaaggtcggttccggcgcctttatgccgacctatgccctgtcgcaagatttggcgcaggcgatcgtcggcgtggccaacggcgcgggctgcaagaccaccgcgctgctgaccgacatgaaccaggtgctggcctccagcgccggcaatgcggtggaagtgcgcgaagcggtgcgtttcctgaccggtgaataccgcaacccgcgcctgctggaagtgacgctggcgctgtgcgtggagatgctgctgtccggcggcctggcgaatgacgaggccgatgcgcgtgccaaactgcaggcggtgctggacaacggcaaggcggcggaagtgtttggccgcatggtggcggcgcagcaagggccgatagacttcgtcgaacgttatgatagctatctgccggcggcaacgctgagcaagccggtgtatgctgaaaatccgggcatcatcagcgccatggatacccgcgcgctgggcatggcggtggtttcgctgggcggcggccgccgccgggcgagcgacgccatcgattacagcgtcggtctgaccgaggtggcgcgcctgggtgataaggtggatgcccagcagccgctggcgatgatccacgccaacgatgaagagagctggcagcaggcggccgatgcggtgcgtagcgcaatgacgctgagtgacaaggcgccggaagcgacgccggtagtgtataagcgcgtcacggaataacccaagaatcaggaacggccgcggctttttcgcggccgtccaaagcgtgagaacacgcaggagagcacagatgaaacgcacatttattatggtattggactccttcggcatcggcgccagcgaagacgccgatcgttttggcgaccggggttccgacactctgggccacatcgccgaggtttgcgcgcgcggtgaagccaacgtgggccgccagggtccgctgacgctgcctaacctgagccgcctggggctcggcaaagcggcggaagagtccaccggcaatttcccgcaggggctggatcgcaatgccgacatcatcggcgcttacgcatacgccagcgagctctcttccggtaaagacacgccgtcgggccactgggaaatcgccggcgtgccggtactgttcgactggggctatttcaaggacgagcacaacagcttcccgcaggcgctgctggataagctggtggagcgcgccaacctgccgggctacctgggcaactgtcactcatccggcaccgtgatcctcgatcagctgggtgaagagcacatgaaaaccggcaagccgattttctacacctccgccgactcggtgttccagatcgcctgccatgaagaaaccttcggcctggatcgcctgtacgagctgtgcgaaatcgcgcgtgaagagctaaccgaaggcggttacaacatcggccgcgtgatcgcgcgtccgttcgtcggcgacaagccgggccacttccagcgcaccggcaaccgccacgatctggcggtagagccgccggcgccgaccgtgctgaaaaagctggtggacgagaagggcggtgaagtggtgtcgatcggtaaaatcgccgacatctatgccaacgtcggcatcaccaagaaggtgaaagcgaccggcatcgacgcgctgttcgacgcgaccctgattgaaatggaaaaggccggcgacaacaccatcgtgttcaccaacttcgtggacttcgactcctcttacggccaccgccgcgacgtggcgggctacgccgccgcgctggagctgttcgaccgccgcctgccggagctgctgaagctggtgaaagacgaagacatcatcatcttcaccgccgaccacggctgcgacccgacctggccgggcaccgaccacacccgtgagcacatcccggtgctggtctacggcccgaaagtgaaaccgggctcgctgggccaccgtgagaccttcgccgacatcggccagaccgtcgccaattattttggcctgtcgccgatggattacggtaaaaccctgttttaattcgtgagtttaaggcggtggcgcagttggccgccgcctgacataccacggcttatacgtttaacgctatttaatacgatttaaaggaagagaattatggctacgccgcacattaatgctgagatgggtgatttcgctgacgtagtactgatgccgggcgatccgctgcgcgcaaaatacatcgccgaaaccttcctggaaggcgcggtggaagtgaacaacgtgcgcggcatgttgggcttcaccggcacctacaaaggccgccgcatctccgtaatgggccacggcatgggcatcccgtcctgctccatctatgcgcgcgagctgatcgccgaattcggcgtgaagaagatcattcgcgtgggttcctgcggcgcggtgcgtgacgatatcaaactgcgcgacgtggtgatcggcatgggcgcgtgcaccgactccaaggttaaccgtctgcgcttcaaggacaacgactacgcggcgatcgccgacttcgacatggtgcgcaacgcggtcgatgcggcggcggcgcagggcatcccggcgcgcgtgggcaacatcttctccgccgatctgttctacaccccggatccggacatgttccaggtgatgaagaagtacggcatcctgggcgtggaaatggaagcggccggcatctacggcgtggcggcggagctgtacgaagagttcggctgcaaggcgctgaccatctgcaccgtgtccgaccacatcctgcgtcacgaagcgaccacggcggcggaacgccagaccacctttaacgaaatgatcgttatcgcgctggaatccgtgctgctgggcgacaaagcgtaataccgcggcgggcgtcgccatggcgcccgcccgtcaatctattcactccgcatggccgtttttggctaacgctctacctttcaattggatgtggatcccgttgttacggacaatctattcaccgaaaggacaagaaaacggcacggacgcattcaacgcctggcctgagttactccttcttcggcgcttcctgctttgtctccggcgcatcctcttcgtcgtcttccaccgtattgccttcttccagtggcgtgttggcggtcaacaggtagggcgactgctgccagcggctgcggcggtgctgcagcagggtgcgcgccagaatgatgccgatcgccagcgccagcaggatcatcaggcgcagcaggttggtggtgttgtccacctgtttggattcggtcgccagcacgtgggtgtcgagggtgatgcggataaagccgatcgggccgtctttgccctgaatggattcgaccaattggtggttgaagtagctgccggcgcgtttgccgtcgagcgacaggcgatcgcgtatacttatctgctccccggcgtgggagaccagcgtgccgtccaactgatacacgctgacgtcgagaatgcggctgtgatcggtgagctgcttgaggatggcgtcgatgcgcgggttgttgccgtcgtcgtccagcagcggcgccaggctgtaggcgacctgtttggtcagcgtctgcgccagctcttccacctgctcggatcgcgccatttggtgactcaggctaaaataagaggcgccctgcatcagcagcaccagcaaagccaggcaaatcaggataatagcggtgcggtgcaggcgaaatttcagtttagcgcgagccatgcaggttccttgggcatcggggacactttatgttgccagaaccgctggcgataggatagcttgatgcgtcgttttatcatgcagcgtttttgtccattcaggagtcaatgatgtcaaacagtctgacctattgcgatcttccggcggagatctctcaatggccgggtcttcccctttcgctcagcggcgacgaagtgatgccgctggactatcgggcgggcaataccgggtggctgttatacggcaggaagctggacaaggcgcgcattacccaattccaacgcaagctgggcgcggcgatggtgatcgtcaccgcctggggcgtggacgactatcaggtggtgcgcctggcgggcaccttgacgccgcgcgccaagctgttggcggcggagagcgggctggacgtggcgccgctcggcaagatcccgcacctgcgcacgccggggctgctggtgatggacatggattcgacggcgatcgagatcgaatgcatcgacgagatcgccaaattggcgggcgtcggcgagcaggtggcggaagtcaccgaacgcgcgatgcgcggcgagctggactttaccgccagcctgcgccagcgcgtcggcacgctgaaaggggccgatgccaacatcctcaagcaggtgcgcgacgagctgccgttgatgccggggctgaccagcctggtgggcaagctgcaggcgatgggctggcatgtggcgatcgcctccggcggcttcacctactacgccgaatacctgcgcaaccggctgcggctggtggcggcggcggccaatgagctggagatccgcgacggcaagctgaccggcgaagtgctggggccggtggtggacgcgcagttcaaagccgacacgctgctgcggctggcggggaagctggagatcccgctggcgcaaaccgtggccatcggcgacggcgccaacgatttgaaaatgatgcaggcggcggggctgggcatcgcctaccacgccaagccgaaagtgtatgaaaaagcgcaggtatcgatccggcatgcggatctgatgggcgtgctgtgtattctcaccggcagcctgaaacacgaagtgcgataacgaaagattgaggtaagacgtggcaaaagcggcaaaacgggcatttgtgtgcaatgagtgcggggcggactatccgcgttggcaggggcagtgcagcgcctgtcatgcctggaacaccatcacggaagtgcgtttggccgcgtcgcccgcagcggcgcgcaacgatcgcctcagcggctatgccggcgacgccggcgtcagcaaggtgcagaagctgtcggaaatcagcctggaggcgctgccgcgcttcaccaccggctttctcgagttcgaccgcgtgctgggcggcggcgtggtgcccggcagtgcgattctgatcggcggcaaccccggcgccggcaagagcaccctgttgctgcaggtgttgtgcaagctgtctgaacagatgaaaaccctgtacgtcaccggtgaggagtcgctgcagcaggtggcgatgcgcgctcaccgtctggggctgccgaccggcggcctgaacatgctgtcggaaaccagcatcgagcagatctgtctgatcgctgagcaggaacagccgaagctgatggtgatcgactcgattcaggtgatgcacatggcggacattcagtcttcgccgggcagcgtggcgcaggtgcgggaaaccgccgcctacctgacgcgcttcgccaagacgcgcggcgtggcgatcgtgatggtcggccacgtcaccaaagacggctcgctggccgggccaaaagtgctggaacactgtatcgactgttcggtgctgctggacggcgacgccgattcccgcttccgtaccctgcgcagccacaagaaccgcttcggcgcggtcaacgagctgggggtgttcgccatgaccgaacaggggctgcgcgaagtcagcaacccgtcggcgatcttcctcagccgcggcgatgaagtcacctccggcagctcggtgatggtggtgtgggaaggcaccaggccgctgctggtggagatccaggcgctggtggatcactcgatgatgtccaacccgcgccgcgtggcggtgggcctggagcagaaccggttggcgatcctgctggcggtgctgcaccggcacggcgggctgcagatgtcggatcaggacgtgttcgtcaacgtggtcggcggggtgaaagtcagtgagaccagcgccgatctggcgttgctgatgtcgctggtctcgagcctgcgcgatcggcctctgccgaacgatctggtggtgttcggcgaagtggggctggcgggggaaattcgcccggtgccgagcggccaggagcggatcgccgaagcggccaagcacggcttcaagcgcgccatcgtgccgcacggcaatatgccgaagaagccgccggccaacatgcaggtgttcggggtcaagaagctggcggacgcgctggacgtgctggaagagttttattaatgtcgccgacggcgagcaagatatgctattttgtttagcatactaaacggaggtggccatgccgcaatttgattacctgaagacgtccatcaagcaaaaaggctgcacgttgcagcaggtggcggatgccagcggcatgaccaagggctatctgagccagctgttgaacgacaagatcaaaagcccgagcgcgcaaaagctcgaagcgttgcaccgttttctcgggctggagttcccgcgtaaagaggttaaagtcggcgtggtgtttggtaaattttacccgctgcacaccggccatatctacctgatccagcgcgcctgcagccaggtggatgagctgcacgtcattttgtgccacgacgagccgcgcgaccgcgaactgttcgagaacagttcgatgtcgcaacagccgacggtcagcgatcgcctgcgctggctgctgcagaccttcaagtaccagaaaaacatccatatccactcgttcgacgagcagggcatcgagccctacccgcacggctggaacgtgtggagcgacggcatgaaggcctttatggaacagaaaggcatcgtgccgagctttatctattccagcgaagcgcaggatgcgccgcgttaccgcgagcatctgggcatcgaaaccattctggtcgaccccgagcgttcgttcatgaacatcagcggcaatcagatccgccaggatccgttccgctactgggattacatcccgaccgaggtgaagccgttcttcgtgcgcaccgtggcgatcctcggcggcgagtcgagcggcaaatcgacgctggtcaacaagctggccaacatcttcaacaccaccagcgcctgggaatatggccgcgattacgtgttctcgcacctgggcggcgacgagatggcgctgcagtactccgactacgacaaaattgccctcgggcaggcgcaatacgtggatttcgcggtcaagtacgccaacaaggtggcatttatcgataccgatttcgtcaccacccaggcgttttgcaaaaagtacgaggggcgtgaacaccccttcgtgcaggcgctgatcgacgaataccgtttcgatctggtgatcctgctggaaaacaacacgccgtgggtggcggacggcctgcgcagcctcggcagtaccgccgatcggctggcgttccagcgcctgctggaggagatgctgcgcgccaacaatatcgagtatgtgcacgttgagtccagcgattacgaagagcgcttcctgcgctgcgtcgagctggtgcaacagctgctggcggcggacgccggccggttggcgaacgcgcccgcccagcatcacgccgcaggctgagcaaaattagcgtaatgtgcgatcgcgcggcagaaacggccgcccgggcgcacatttaacggcttgtttaaacatggttcattcgacagcgactacgttaagcttttctttacaataacgcttagaagaagacatgtcttatcgcttgctcgctctttggttggtctgctatgccgcagcctggacgctgctgactgttcatctcgatcctaccctgccttacgacgccgtcgaggcgctcaactggggcctcaacggcgaatggggctcaccgaaaaacccgtggctggtcggggcggcgatgcagccggcgatcgggttctcgtggctgccgctgaacctgtactggtatggcgggcacttcatcgccatcgccatcggcatgttgggcgtctggctgttggcgcgccggctgagcggcagcacctcgctggcctggatggcgctgttgacgctcaacctgtccggcatcatcaatttcgacatcattccctacaacgacaattacctgttggtgatgctgtggccgtggatggcgctgtttttccacctggctatatcgcgttcggccaactggtggccggccttcgcgctgacggccggtttggcgatgatggcgaagtactcgaccttcgccttcgtctatttcgccgcgctgtcgacgctgttcgtaccgcagatccgccgctgttatcgccagccgcagttctatctggcggtggcgatctggttggcgctggtgttgccgaacgtgttctggttgtggaaccacgatttcgccgccttcaagtgggtggattcgcagatcaagatgcagctcaatctcgacatgctgcagtcgctgctgctggtgttctatccgtcgctggtgctgtgggggatcctgcggcgcagcggggcggtgctggcctggccatcggcgttgccgatgcgggtgttgctgtgggtctacctgttgccgctcggcatcattaccttctggttctctttcaacgtcggcggccggctgaccgaatggctgcagccgttcttcatgctggcacctgcgctgttggtcggttgcgtgcgccagccgccggtgcgttcgctgcgcgcggcgaccattggtctgatgtgcgcggcgctggcggtctacctggggtatgccgcggtgatgctgggcaacgtgcgcaacgccggtcagaaaatggtgggtatcaaggcgttcagcgccgaggtggagcggcagtggcaggagcggtatggcgttgaactgcgctacgtcggcggcgaatacctgtcgcagtggatgacggtgtacgccggttcccggccgcgaaccattacgcgttggtccaatcatacgcggccgaatatctacaacgtcaacatcagctatccgcagattgcgcagcacggcgttgccctgttcgggcggttgggtgaggactgcgcgcgcagcgacttcggcggcgagttggcccactggccgaagatgcgcctcgattggcagcagacgctgacgttccgcgccgatccgcatagcgacgagcagacgctgtgcgtcggtttcgttcgtccgcagtaacggcggcgcgctgcgccgccgcgattcaggctcagtaagcgataaccagcttgccttgcatatggccgccgagcagctgttgatgcgcggcggtcagcgtgtctaccgacagcccgtgcagggtttcgctcagtgtggtgctcagcttgccctcgtccagcagctgcgccacctgctgcaggatcttgccctgctgcgcgatgtccggggtggtgaacatgctgcgggtgaacatgaattcccagtgcagcgcggcgcttttcagcttcagcgcgttttggtccagcggctgcgcgttttcgacgatggtgcagatatggccgagcggcgcgatcagttcggccatcgccggccagtggccgtcggtatcgttcagacacaggatgtaatccacctgctcgatgccctgctgcgccaggttgcccttcagatcgcggtagtccaccaccagatcggcgccgcgctcaaggcaccaggcggcggattccggtcttgatgcggtggcgatcactttcaccttgctgcgcagcgcggccagcggaatggccagcgaaccgaccccgccggcgccgccgatgatcagcagcgtcttgtgctccggcgcgtcctgaatgttcaggtgttcgaacagcgcctcccaggcggtgagggcggtgagcggcatggcggcggactcggcccagttcaggctgcgcggcttgtgcgcggcgatgcgtgagtcgatcagttggtgactgctgttgctgccggggcgggtgatgtcgccggcgtaccacacttcatcgccgggcttgaagccgctgacgccgttgcccacgtccaccacgacgccgctggcgtcccagccgagaatgcgcggctgctgcaggccgtttttctgcagaccggcgtgcactttggtgtccaccgggttgaccgacgccgctttcacttccaccagcagatcgtactggccgggcaccggcatctccggtgagatttcgatgaaatcgacggggttctgcgggtctacggcaatggcttttatcgacatgattgtactcctttcaaatgatgcccccagtgtagacccgcgacagtggggtgataagatggacaatatctaacggagtgttcgtttaaggtgaacaatggaattcaaacaactgcaggacatggcgttgttcgcgctggtggcggagtgcggcagttttaccgccgccgcgcagcgcgttgggttgccgaaatccagcgtcagccagcgcatcagccagctcgagcagacgctggggctacggctgctcaatcgcaccacgcgccagctgaacctgaccttcgccggtgagcgttatctggaacattgtcaggtcatgatgtctgctgccgaacgtgccgatctggcattgcagcggctgcgcgataacccgagcggccgcctgcgcatctcgacgcccgccgggctgggggcgaccctggtggcgcggctggcagcggattttcagcgccagtacccggacgtttcgctggaggtgtcggtgtccgacgcgatggtggatctggtgcaggaaggtttcgacgccgcgctgcgcaccggcaagccgcaggattcttcactgatcggccgccgtctcgggtatgcgccgcgctatctgttggccgcaccgtcctatttggcgcagcacccgccgatcgaacatccgcagcagctgcagcagcatcgctgtatcgcccaccgcgcctggacggcctggaacctgcgctgcggcgatgactactaccgttggcagctgccgctggcgcacaccaccgacaacctgctgtatgcgcgcgaatgcgccatcgccggcgcggggatcacgctgctgccggcgtttctcagccgcgaggtggtggcgcagaaactgctggtggaggtgctgccggcgtggcgcgcagaagggaatgagctatatctggtctacccgagccgcaagctgaattccgcggcgttggcctgcttcatcgatgtggtgctgcagcatccggcgttcgacgactacgcgcgcgagctggcgcgggagtaaaaaaaggcgccgcatgcggcgcctttcgtattacttggcgatcttcttgtacttgatgcggtgcggctcgagcgcatcggcgcccagcgtacgcttcttgtactcttcgtactcggtgaagttgccttcgaagaattccaccttgccctcgtcctggtagtccaggatgtgggtagcgatacggtcgaggaaccaacggtcgtgcgagatcaccatggcgcagccagggaattccagcagggcgttttccagcgcgcgcagggtttcgatatccaggtcgttggtcggttcatcgagcagcagtacgttgccgccaacctgcagcagcttggccagatgcagacggccacgctcaccgccggacagctcgcccacgcgtttgccctgatcgacgcccttgaagttgaagcggccgacataggcgcggcttggcatctcggtgttgccgatgcgcatgatgtcctgcccgccggagacttcttcccacacggttttcgaaccgtccatgttgtcgcggaactgatcgacggacgccagcttgacggtatcgcccagcacgatgctgccggaatcaggctgctcctggccggacatcatgcggaacagcgtggatttacccgcgccgttcgggccgatgatgccgacgatcgcgcctttcggcaccgagaacgacaggtcgtcgatcagcaggcggtcgccataggacttacgcaggttgctgacttcgaccactttatcgcccaggcgtgcgccaggcggaatgaacagctcgttggtttcgttacgtttctggtattcggtgttgttcagctcttcaaagcgggccaggcgggccttgcctttggactgacggcctttggcgccctgacgcacccactccagctctttctcgatcgacttgcgacgagcggcttcggcggacgcttcctgtgccagacgcgcgtctttctgctccagccaggaggagtagttgccttcccatggaatgccttcgccgcggtcaagttcgaggatccagccggccacgttatccaggaagtaacggtcgtgggtgatcgctaccacggtgccttcgaagtcgtgcaggaagcgttccagccaggccacggactcggcgtccaggtggttggtcggttcgtccagcagcagcatgtccggcttttccagcagcaggcggcacagcgccacgcggcggcgttcaccgccggacaggtgggcgattttggcgtcccagtccggcaggcgcagcgcatcggcggcgcgttccagctgggcgttgaggttgtgaccgtcgtgcgcctgaatgatctcttccaggcggccctgttcggcggccagcttgtcgaagtctgcgccttcttccgcgtacagcgcgtacacttcgtccaggcgcttcagcgcgccgaccacttccgccagcgcttcttccaccgactcacgcacggtgtgttcgaggttaagctgcggctcctgcggcaggtaaccgatcttgatgcccggctgcgggcgcgcttccccttcgatatcggtatcgatgccggccatgatgcgcagcagggtggacttaccggcgccgttcaggcccagcacgccgattttggccccagggaagaagctcagggagatgtttttcaaaatatgacgcttcggcggtaccaccttgccgacgcggtgcatggtatagacgtattgagccacgttgctctaagcctctctatatcagtatttataggatgtctggcggcatgagtgtagcccgtttcgatctcggatcccagacatcgctcagcgatcgctaagtataaccgtttatgcgccgataaaggcgcatattggtggcttatggcgtgacgacgatcgcgacgcggcggttttccgcacggccgctggaggtgcggttatcggcaacgggatcgcgcttgcccatgccgcgggtttcgatattggcgcgtggaatgccgacgctggccagcagatcggccaccgcatcggcgcggcgcagggagagctgatcgttatagctgtcttcaccgtagttgtcggtatggccgtccaggcggaacttggtgatgccgacgctcagcagcgcacggcccatcttctgtaccgtctcggtgctttccgggttcagtttgccgatgttgttgccgaacagcaccttgtccgacaggccgaactcccagccgttatcggtcagtttgaagccctgcgattgcaacagcgcgacctgctcgggtgtcaggccctgcggtttgctctggcagccggcgagcgccagcagagcgacgaacatcatcgtcagcagtgaaaaacggcctttaaaaagttgctgtatcatagtcaaaatccctagttcaagtgttatagccggggctcttatttatgtatagccagccgccagcctccgttataacgatgctttgcctgatacatcgcatcgtcagcttcgtgcaaaagaccctgaggcgtcgatgcgtgatcagggtacagcgcaataccgatactcagagaggtgatgaccgtctcgtcgttcggcagaatgaccggttgcgtcatgcagtcgatgatgttgtcagcgatctgcaagacatcttccgtgctgtgtaccggcgccagcagcacggcgaattcgtcccctcccaggcgggcgaccagatcggtctcgcgcagctgcgcgcgaatgcgcccggcaatggtggtcagcaccgcatcgcctgcggcgtggccgtaactgtcgttcacctccttgaagcgatcgccgtcgataaacagcaccgccaatttcgccggcggttcgatatcgcccagcgcgcggcttagccgcccttcgaagaaggcgcggttcggcaagccggtcaggctgtcgtgcgtcgcccggtgagccagcgagtcgttctcttgcttcagatgggcctgccaggcctccagctcgtcgagcaagccgttgaaatcgttgctgagctcatgcagctcggcgataggcgccgacggcacccgcaggccgaaggtgcgatcgcggcgaaccgcatgcgccacgttggcgatgtcgtccagcgaactgacgatgccgaccagcatgcggcgcgacagcaccagggcgcacagggtgctgagcaccaggcaggcgatcatgccgaccatgccgcgcaacaggaaacgcagcaggctgccgccgttgccgctcagccagacctggccgacctgcttgccctcgtgggtgataggcagaatgaccggttcgggcagcgcccagtgcgcgacgatctgctccaggccgtgcagcggcccatcggtaggatggcgccagttggccagcatcttgccgttgttgtcgaggatccgcgcgtccgatacctcttcgttggaggatatcagcatcagcgcctcgcgcgcggcggtgcggtcttcaaacaccacggcggcctcgacggtatagctgatggagcgcgcgatcaggtgcaggttgtgattggcataggcgcgcagcgcaaacagcgccaccagcgtcaaaaagatgccggcggtgccgacggcgatcagcgccagcccaagatgcacccgctgcagcactcggcccagcgtcgggcgcgcattgccggagcggtttttacgcaacagcctcatagcggcggcgcctgtttgcgtgccagctgcaacacgttggggtgaacgcgcacgccgctgcgcgccagagcgtccaagttgactttgaaactggcctggtccccatcaatctgcaggcaaaatgcgctgccggcggagcattcgctatcgttctcgctgatgctgagaatggagttgccggaaatgcgctgcatgaaattttgtctctgcgcggcggtgatgttccctaagtagatgacatcacagccggtactcagcgttgggctatcgaacggcacgcgctcggctttaatcggacgcggcgcgctcagcaggatcggatcgaacagcccttcggcatactgggtgggtgcggtcacgcacaagcggatcggattaggttcacgcgaccagcgtgcgtagctgatgatgcctaccactacggtcgtcacggcgtgcgtgcgcttttgatagggatcagcggcggcgtgcgcaggctcggacaacgtcagcagcaccaacaaaacgatcagcagcaggcggccgatattcaggcgtgcgtcaaggaagcccggttcggggctttttgcgcaacgcatcgctatcgcggtcttattcaccatcttcacccgccattccggcctgatccactgcccgcaggccgtggcctgacaaggaaaaatccggcccgcttgaagggacaatcgttttgctgaaagctgtcagtcgcactgcctaatgaacactatctaacccataattggcgcggattgtattataagatgtcttcgttgggcgctttatgtgctgttttctcggaattatcttacttatttttgatagtataaaaatgcccacccgggtttgccaccgcttttctgcaaagttggcgcgtttagcccgctgtcaggcgatttgcgcaacggtggcgccatataacaaatcaaataatgtgatgactaataattaaaaagtattttacttctccaataagcgccggggcagctaataaaaatccggtggctggaaatatcccgccggcctgatttgtcagccaaagtaaacgtttttacctggcccgcgtcatggcgatacacttcttcttctacagtattgaatggataagcgattgcgctgtctatggtagatatctgcgtccgggccgtgcgcccggctttattttgtcccgcggcgccgtggtgcggcggtcaccggggagctgggcggctcctgcggtataaccagtgaggaaagagcgaggatggtcaaggtggacaagcgacggctgttggcaatgggcctgtgtctgacggcgttttcaggcgcggcgctggcggattctctggatgcgcaacgtcagcgttaccagcagatcaaacaggcgtgggatggcaatcagatggacgtggtggcgcagctgatgccgacgctgcgcgattacccgctttatccttacctggaataccgcgagctgacacaggatctgagccaggcggggttctccgaggtgaacgactttatcaaacgccacccgacgctgccgccggcgaaatcactggtgccgcgcttcgtcaatgaactggcgcggcgcgaagactggcgcaccctgttggccttcagcgcgcagccgcccaaaccggtggcggcgcgctgcaactattactacgccaaatgggccaccggcgaccagcaggcggcctggagcggcgccgacgagctgtggctgaacggcaaaacgctgccgggcgcctgcgatcgtctgttcagcgtctggcgtggcgcgggcaagcaaacgccgctggatattctggcgcgcatgaagctggcgctgaaagaaggcaacagctcgctggtcagcaacctctatagccagctgccggccgactaccagaccatgggcaacgccctggtgcgcttgcaaaacgatccgaccaccgtggaagccttcgcccgcagcgtggggccaactgactttacccgcgccgctaccggcatcgcctttgaacgcctggcgcggcaggatgtggaaaacgcgcgggcgatgatcccgacgctcgcgcggctgcagaaaatgagcgacgacgaacggctggggttggaagaggcggtggcctggcgcctgatgggcagcgacgctacctacgagcaggcgcagtggcgcgatcaggtgattctgcgcagccgttcgccttcgctgttggagcgccgagtacgcatggcgttgggctatggcgatcggcagggcgtcgcgacctggctggcccgcctgccggaagagtcgcgcaacaaggatgagtggcgctactggcgcgccagtcaactgatggacgaaggcaaacgcgccgaaggcgaggagatgttgcgtaacctgatgaccgaacgcggcttctatccgatggtcgcggcgcagaagctgaacgccacttatccggtgatggtggcggtggcggccaagccgcgcacgtcgctggtcgacgggccggaggtcgcccgggtgcgcgagctgatgtactggaatatggataacctggcccgcagcgagtggggctcttacgtcgccagccgcagccggccggaacaagaagcgttggcgcgctacgcctttgagcaaaaatgggccgatctgagcgtgcaggcgaccatcgtcggcaagctgtgggatcatctggaggagcgcttcccggtcgcctggccgcaggagttccgccgcgcgaccgatgacaaggggattaccaccagctacgcgatggcgatcgcgcgtcaggagagcgcctggaatccgaaagcgcagtcgccggttggcgctaccggcctgatgcaggtgatgccgcgcaccgcgcagcatacggtgcagatgttcaatattcccggttacgtcggcccgagccagctgttcgatccacagactaacatcaccatcggcaccagctatctggagtcggtctatcagcagttcggccgcaaccgcatcctgtcgagcgccgcctataacgccggcccgtcgcgggtgaacacctggctgggcaacagcgcggggcggatcgatccggtggcgttcatcgaaagcattccgttctcggaaacccgcggctacgtcaagaatgtgttggcctatgatgcgttttaccgctatctgacgcaccggccggccaaggtgctgaccgacgccgagtggcagagacgttattgattttgacggccctatggtatgctgctgtactagttaaatagtatggtggctgccatgacgcaattatcgttaaacgaccccgctctttcagaacaaggcaatgaggattggctgcgcttcgtcgcgctgctgcagaattcgtttgcgcaagaactgcatcaaccgctgctgcagctgatgctgacgccggacgagcgcaccgcgctgggcacccgggtgcgaatcatccaggaactgatgcgcggcgagatgagccagcgcgagctgaaaaatgaactgggcgcggggatcgccaccatcacccgcggatcgaacagcctgaaagcggcttcacccgagctgaaacagtggcttgagcagcagctgctgcacgatgcgccctagcaggttttgcgctattgctgatagatggcgttgtgaaacggcaccagcgccagcagcagcgcctggtgataaacgctggtgcggctcagccggccgtcggtgaagacgccgatggcgccgccctggcgcttcacctcggcattgccggtgatcgccgccatttcgctgcccaattcgcgaccggcgcgaataccttgtaagatgacctccggcagcatcaggctcgccgagcgagattcgccgcggatgtgcgggttctcgatggtcatccaggcgaaggtcatattctcttcaatcccggcttccacgccgacccaaaaatcggcctcgggcctgacctggcgcgcttccatgacgcgttgacgcgagccggtgcgggtttcgtgattgcctatcggctgcagcgagacaccgctggcgacgtcaacggattcaatgcggtattggcctgcgccaaagacgtcatcgaaggccagttgaatagccttgatctttgccgggttggtagttgcagcgacaacatggtacataacgggtttgatatccttctggccgatacgccgggcagcggcaaaagcgccaccgggccggggataaatgcaaatttcacgcagtataacggaaaacaaaaatgttacaggtatacctcgttcgccatggcgaaacggaatggaacgcggctcgccgcatccagggtcagtccgacagcccgttaaccgccatgggtgaacaccaggcccgtctggtcgccaggcgcgtcagcaaagaaggcattacgcacatcattaccagcgatctggggcgcacgcgccgcaccgcacagatcatcgccgacgcctgtggctgcgaagtgattagcgatccgcgtttgcgtgagctgcacatgggggttctggaagaacgcctgatcgacagtttgacgccgcaggaagagcagtggcgcaaacagatggtcgatggtactcctgacggtcgaatccctcaaggcgaatccatggaggagctgggcgagcgcatgcgcgccgcgctggagagttgcctgatgctgcctgaaggcagcaagccgctgctcgtcagtcatggtatcgcgttggggtgtttgatcagtacggtgctggggctgccggcctatgcggaacgccgcctgcgcttgcgcaattgctcactgtcgcgcgtcgatcaccagcagagcccgtggttggcttccggctggatcgtggaaacggcgggcgatgtcacgcatttggacatgcccgcgttggacgaactgcagcgttaacgccgaatcgggatcaggtaatcgcacttgatctcgataggtgcctgatgcggacggcgctcgcctttcggatagaagcgctcgatgtcgtgccctttgcggcgcgtcagctggagcgccggcaggcaggtgccgtagaccgtcagaataaagtcttgcagtccctcggtgggcccttcgtagctgaacatcgcaaactcaccgcccggcaacaccagcggctggccttcctgtaccttgtcaggcacctgatccggctccagcgccgtggtgtacagcacttcctgttcgtcgtccttctcctggctcggtcgcgagtggtgcagcccgtacagcaccggcggcagggtttcgacgtcaccgaggaactgacgccagaactgtgagcgcagttcggtgcgcacggtggtgatctgttccagcgtacaggagtagctttgagtcaggccgaccagctgcttgtccggcagcgagacgaattccggctgcggcaaggtgaaggctcccagacggatcggcggacagatgccgaatgcattccagtcttcggcgcggcggtacagcgccggcgtttgcgcaaactgttttttgaaggcgcgcgtgaaggtctgctgcgagtcgaagcgatattgcagggcgatatccaaaatcggccggctggtcaaacgcagcgcgacggcggctttggacagcctccttgcccggatgtaagcaccgatggcgttaccggtaatatctttgaacatccgttgcagatgccatttggagtagcctgccttggccgccacgttatccagcgacaagggttggtccaaatggctttccagccagctaagcagatcacgaatgataccggcttgatccatagatcttcctcgtaaagcttgggggtaggaacccgaactgttgattcgtcacgctggtgctgcgctatcagaccgatccatgagccattatgcgttgcactctttgcctctgctgcgcatgccgcgccagagttggattggggtacaccgtagtgggcgcaaagaaataacgacgccgcatcatagcaatttttttactccgcgactctcaaagatttttgtcacgctctgtgctaaaacggacggtgcggacccgtaaaaaaccgattccgtgagcttagacataaataatggcgaccgccgaacctatttttgcggcaaggttataccggagttaagtaaatgaaaaaaagctggatatttttattcggtttggtttgcgcaaccgttggcagcgcgcaggcggagcaggtgggctccgttgatacggtgtttaaattgttggggccagaccacaaaatcgtagtggaagcgttcgacgatccggatgttaaaaatgtaacttgttatatcagccgcgccaaaaccggcggcatcaaaggcggcttggggctggcggaagacaccgccgacgcggccatttcctgccagcaggtggggcctatcgagctgagcgacaagatcaaaaacggcaaggcggaaggcgatgtggtgttccagaaacgcacctcgctggtgttcaagaagttgcaggtggtgcgcttctatgacgccaagcgcaattcgttgatttacctgagctactccgacaaggtgatcgacggttcgccgaagaacgcgttgagcgcggtgccgatcatgccatgggctgagacgaaataaaaaaacggggttcagcatgctgaaccccgttttcatgacggcaggccggaattactcttccagatcgccgcagaagcggtagccttcgccgtgaatggtggcgatgatttccggcgtatccggcgtcgattcgaagtgtttgcgaatgcgacggatagtgacgtccacggtgcggtcatgcggcttcagctcgcggccggtcattttcttcagcagttcgccgcgcgactggatcttgcccgggttttcgcagaagtgcagcatggcgcggaattcgctgcgcggcagcttgtactgttcgccggccgggctgatcaaagagcggctgttgatgtccagctcccacccgttgaacttgtagctctcgaccagacggcgctcttcgccgaggctgcccaggttcatggtgcgcgacagcaggttgcgcgcgcggatggtcagctcacgcgggttgaacggcttggtgatgtaatcgtcggcgccgatttccaggccgaggattttgtccacttcgttatcgcgaccggtcaggaacatcaaggctacgctggcctgttcacgcagttcgcgcgccaacagcaggccgtttttgcctggcaggttgatgtccatgatgaccagattgatatcattttcagacaggatattgtgcatctctgcaccatcattggcttcatgaacaatgtagccttccgcctcgaaaatgctcttcagggtgttacgagtgactaactcgtcttcgacaatcagaatgtgcggggtctgcatatttgctacctaaaattgccaacaaaatagaaaatcggaagtacagaagtctttgttttcttagaggagggcagagatagcgccacgttccctctcagcaaatgactaaagtacgtaaactcgttcttgatgcactttccatctcatgtcaacaagatcgctagcctggtggggatgctgttccctacaaccccttgggtgccgaaacggcgcatatcctaaccccattaacagcaatataacagcgcgtgccgaattcatcacccaacaaaactacgctttgttgacatatatcaaattcaattgtagcacgttaacagatttgtgaaaaacacttacagaaatgccagtttaagtcacagaacctcaaattctgtgaacgattcagcattctccggcacgataggatacaattattcgcttattgatcatcgcattgttttaacttattgataaataaaagcagtaaaacataagcgcgaataatgactattacgacgggtttattagttcaacgagccgtttaatcttgtttgttgctattaacgcgtttattgttgcgtaattgtaaatataagcgggcgctgcgccatcgtcaaaaacgcaggcccgccttcggtggaagagtcatgcagcttcatattgttttagtggctccggcgcggccggaaaatgtcggcgcggcggcgcgcgcgatgaaaaccatgggcttcacgtcgttgcgcatcgtcgacagcgaagcgcacctgcagccggcggcgcgctgggtggcgcacggtgccggtgagatcctcgacggcgtgcaaacgttcgccacgctggaacaggcgctggcgggcgtggattttaccgtcgccaccaccgcccgcagccgcgcgcgctttcactactactgtacgccgcccgaactgctggaacagctgagcgagcgtaagcagtgggtcggccaggccgcgctggtgttcggccgcgaagattccggcctgaccaacgaagagctggcgctggcggacttgctgaccggcgtgccgatgcaggcggactatccgtcgcttaacctgggccaggcggtgatggtttactgctaccagctggcgagcctgatgggtgtcagtacaccgcaggaaacggcggcgtcggaagggcagctcaaggcgctgcgccgccgcgccgatgccttgttgaacgcgttggaggtcggcgatgaccaaaaattgcgcgactggctgcaccagcgcctcggcgcgctgcaacagcgagatacggcgatgctgcatacgctgctgcacgatatcgaaaaaaaactcgccaagtgatagcggctccatcagacggttacccagcgtgatccactagtaaataggctttaagttgtttttttgttctgtcattttgcttttcacctgttgcatcgcgcattaccgccgctgaacggaaaataagcaaaaaaaagaaatagtttgacttgggatagcgattgctttaaccaatagaggggacagagtatttcatgagacagacagacaacatgcgcaacatcagcctgaaaaccacaattattaccaccaccgataccacaggtaacggggcgggctgacgcgcacaggaaacacagaaaaaagcccgcacctaatcagtgcgggcttttttttcggcttaaattcggagagatcacacatgcgagtgctgaaatttggcggaacctcggtggcgaatgcagaacgttttctgcgcgtcgccgacatcatggagagtaatgcgcgtcagggacaggtagccacggtcttgtccgcccccgcaaagatcaccaaccatctggtggcaatgatcgacaaaacggtggcgggccaggacattctgccgaatatcagcgacgccgagcggatctttgccgacctgctgagcggcctggcgcaggcgctgccgggctttgaatacgatcgtttgaaaggcgtggtcgatcaggagttcgcgcagctcaaacaggtgttgcacggggtctcgctgttgggtcagtgcccggacagcgtcaacgcggcgatcatctgccgcggcgaaaagctctccatcgccatcatggaaggggtgttccgcgccaagggttatccggtcacggtgatcaacccggtggagaaactgctggcgcagggccactacctggagtctaccgtggatatcgccgagtccacgctgcgcatcgccgccgcggcgatcccggccgaccacatcgtgctgatggccggtttcaccgccggtaacgacaagggtgagctggtggtactgggccgcaacggctccgactattccgccgcggtgctggccgcctgcctgcgtgccgactgttgcgaaatctggaccgacgtcgacggcgtgtatacctgcgatccgcgcaccgtgccggacgccaggctgctgaaatcgatgtcgtaccaggaggcgatggagctttcctatttcggcgccaaagtgctgcaccctcgcaccatcacgccgattgcccaattccaaattccttgcctgataaaaaacacctccaacccgcaggctcccggcacgctgatcggcaaagacagcaccgatgccgatatgccggtgaaaggcatcaccaacctgaataatatggcgatgatcaacgtctccggcccgggcatgaaaggcatggtcggcatggccgcacgggtgttcgccgtgatgtcgcgcgccggcatttcggtggtgctgatcacccaatcctcttccgaatacagcatcagcttctgcgtgccgcagggtgaactgcagcgcgcccgccgcgcgctggaagaggagttctatctggagctgaaagacggcgtgctggatccgctggacgtcatggagcgcctggcgatcatctcggtggtcggcgacggcatgcgcaccctgcgcggcatttccgctcgcttcttctccgcgctggcgcgcgccaacatcaatatcgtcgccatcgcccagggctcttccgagcgttcaatctcggtggtggtcagcaatgattccgccactaccggcgtgcgcgtcagccaccagatgctgttcaacaccgatcaggtgatcgaagtgttcgtcatcggcgtcggcggcgtcggcggggcgctgatcgagcagatctaccgccagcagccgtggctgaagcaaaaacatatcgacctgcgggtgtgcggcatcgccaactcgcgcgtgatgctgaccaacgtgcacggcatcgcgctggacagctggcgggacgagctggccggcgcgcaggagccgttcaatctcggccgcctgatccggctggtgaaggagtatcacctgctgaacccggtgatcgtcgactgtacctccagccaggcggtggccgatcagtatgtggacttcctggcggacggcttccatgtggtaacgccgaacaaaaaggccaacacctcgtcgatgaactattatcagcaactgcgcgccgccgccgccggttcgcaccgcaagttcctctacgacaccaacgtcggcgccggtctgccggtgatcgagaacctgcaaaacctgctgaacgccggcgatgagctggtgcgtttctccggcatcctgtccggttcgctgtcctttatttttggcaagctggatgaagggctgtcgctgtcggcggcgactctgcaggccagagccaatggctacaccgagccggatccgcgcgacgatctgtccggtatggacgtggcgcgcaagctgctgatcctggcgcgcgaagccggttacaagctggagctgagcgatatcgaggtcgagccggtgctgccgccgtccttcgacgcgtcgggcgacgtggagcatttcctggcgcggctgccggaactggataaagagttcgcgcgcaacgtggccaatgccgccgagcaaggcaaggtgctgcgctatgtcggcctgatcgacgaagggcgctgtaaggtgcgcatcgaggcggtggacggcaacgatccgttgtataaagtgaagaacggcgagaacgcgctggccttctacagccgttattatcagccgctgccgctggtgctgcgcggctacggcgccggtaacgatgtgaccgcagcgggcgtgttcgccgatctgctgcgcacactgtcatggaagttgggagtttaatatggttaaggtgtatgcaccggcctcgatcggtaacgtcagcgtcggttttgatgtgctgggcgcggcggtttcgccgatcgacggcacgctgctgggcgactgcgtcagcgtggaagccgccgagacgttcagtctgcaaaacgccgggcgcttcgtcagcaagctgccggccgagccgaaagagaacatcgtttatcaatgctgggagcgtttctgccaggagatcggccgcgaagtgccggtggcgatgcggctggaaaagaacatgccgatcggatcggggctgggctccagcgcttgttcggtggtggccgggctgatggcgatgaacgaattttgcgatcgcccgctggataagacgacgctgctcggtctgatgggcgagctggaaggccgcatttccggcagcgtgcattacgacaacgtggcgccctgctatctgggcggcctgcagctgatgctggaagaagaaggcattatcagccaggaagtgccgtgctttgacgattggctgtgggttatggcctatccgggcatcaaggtctccaccgccgaagcgcgcgccattttacccgcgcagtaccgccgtcaggattgcatcagccacggccgctatctggccggctttattcacgcctgccacacccggcagccgcagctggccgccaaattgatgcaggacgtgatcgccgagccgtaccgcacccggctgctgccgggcttcgccgaagcgcgcaaggcggcgcaggagatcggcgcgctggcctgcggcatctccggctccggcccgacgctgttcgccgtctgcaacgacggcgccaccgcgcaacgcatggccgcctggctgcaacaacactatctgcaaaacgacgaaggttttgttcatatttgccgtctggataccgcaggcgctcgactattgggataacgcatgaaactgtacaaccttaaggatcacaacgagcaggtcagcttcgcgcaggcgatcaaacaaggcctgggcaagcagcaggggctgttcttcccgctggagctgccggcgttcgaactgaccgagatcgaccagctgctggagcaggactttgtcacccgcagcagccgcattctgtcggcctttatcggcgaagaagtgccggaagcggcgctgaagaaacgcgtacaggccgcctttgagtttccggcgccggtagcgaaagtgacggaagacgtctcctgcctggagctgttccacggcccgacgctggcgttcaaagacttcggcggccgctttatggcgcagatgctggcggaagtggccggcgatcagccagtgaccattttgaccgccacctccggcgacaccggcgccgccgtggcgcacgccttctatggcctgaagaacgttcgggtggtgatcctttacccgcagggcaaaatcagcccgctgcaggaaaagctgttctgcaccctgggcggcaatattcacaccgtggcgatcgacggcgacttcgacgcctgtcaggcgctggtgaaacaggcgttcgacgatcaggaattgaaagacgcgctgcacctgaactcggccaactcgatcaacatcagtcgcttgctggcgcagatttgctactacttcgaagcggtggcgcagctgccgcaggaagcgcgcaatcagctggtgatttcggtgccgagcggcaacttcggcgatctgaccgccgggctgctggccaaatcgctgggcttgccggtgaagcgcttcatcgccgccaccaacgccaacgacaccgtgccgcgcttcctgaccagcggccagtggcagccgcacgctacggtcgcgacgctgtccaacgccatggacgtgagccagccgaacaactggccgcgcgtggaagagctgttccgtcgtaaggtctggcaactgaaagagctggggcacgcggcggtcagcgacgagaccaccaaagacaccatgcgtgaactggccgagctgggctatatctccgaaccgcatgcggccatcgcttaccgcgcgctgcgcgatcagctgcaggaaggggagttcgggctgttcctcggcacggcgcatccggccaagtttaaagagagcgtggaagcgatcctcggccaggaactgccgttgccgaaagcgctggcgctgcgggccgatctgccgctgctgtcgcacacgctgccggccagtttcggcgagctgcgcaaattcctgatggcgctgccggcctgaagttcggcaggctagaaggcgaaaagccgtcttgcgacggctttttttatgcctgctccgggcgtttgaacaccagctcattgccttgcgaagcggcttcgtcgaaggcgtagccttccaggttgaagtccgccagctgctcgctgcgcgtcaggcggtttttgatgataaagcggctcatcaacccgcgcgctttcttggcgtagaagctgatgaccttgaacttgccgttcttctcgtcgaggaacaccggtttgatcagcgagccgtgcagcttggccggcttcaccgctttgaaatactcgtctgacgccaggttgaccaccacgtcgtcgccctgttgctccagcgcttcgttgagcttttgggtgatctgatcgccccagaagctgtacagatctttgcccttcgggttttccagcttgatgcccatctccagccggtacggcatcatcagatcgagcggccgcagcacgccatacaggccggacagcatgcgcagatgctgctgggcgaagtcgaaatcggcttcgttgaaatcctgcgcctgcaggccggtgtaaacgtcgcccttgaacgccagcagcgcctggcgggcgttgtccggggtaaatttcggctgccattcgctaaagcgcgcggcgttgagcccggccagcttgtcgctgatgctcatcaggctggcgatttgcgccggcgtcagcgcgcggcaaattttgataagccgctgagatttgtccagcagttcgggctgcgtgaagcgttctgtcgccagcgggctgtcgtaatcgagcgtttttgcaggggaaataataacgagcatggccagatcctgtttatccaagtgcgcatactgtagcaaaaagcgcggaaaaaaggggcaatcagtccaataggcggggcgtgcatcgcacacgccccggaatactcagcgcggcggctgcttgtcgtcccacacgcccggctccagctgcgatttcagctccggataacggttggcatcgaaggtcggcagcttgcccaggcggcgctggcgatggtagtcgtcggccagcttcagcgccacccgcgacagcagcaggatcgccgtcaggttggtgatcgccatcagcgccatggaggtatccgccattttccacaccagcggcagctccgccagcgcgccgaacatcaccatgcctagtgccacgcagcggaaaatcagcaggccgcccggatgattgtgttcgaggaacaccaggttgctctcggcataggcgtagttggcgatgatcgaggtaaaggcgaagaagaagatggcgatagcgacgaacggcgtgccccaactgccgacggcggtcgacagcgcgcgctgggtcagatcgatgccgctgatgctgtcggtcggctgatcgagaatgccggaggagaggatgatcgccgcggtggcgctgcagatgacgatggtgtcgataaataccccgagcatctgcacgtagccctgtgaagcgggatgcggcggataaggcgaggcggacgccgccgcgttgggcgccgatcccatgccggcttcattggagaacaggccgcgctgcacgccctgggtcatcgcctgggagataccgtaaccgacggcgccggccgcggcttcctgcaggccgaaggcgcttttgaagatcagcgtcaggatcgccggcatgtgctcgatgttatggccaatcacccagagagccagcagcaggtaggcgccggccatcagcggcaccaccagctcggccactttggcgatggagcggatgccgccgaagatcaccacgccgctcagcagcaccagaccgatgccgacgtgcagcggctgtaagtggaaggcgacggccgaagcttgcgcgatggagttggcctgcacggcgttgaacaccagaccgaatgcgatgatcaggaagatcgaaaacagcacgcccatccagcgcatgccaaggcctttttccatgtaataggccgggccgccacggtagttgccgttatcgtctttggttttatagagctgagccagcgagctttccacaaatgaggtggccatgccgataaacgccaccacccacatccagaagatggcgccggggccgccggcggtcagggcgatggcgacgccggtcaggttgccggtgccgacgcgtgctgccagcgtggtgcacagcgcctggaaagaggagatgccggcgctgtcgcttttattgctgtttttcaacaccgagaacatgtggctgaagtggcggagctggataaagcgggtgcgcagcgtgaagtaaatgccggtgccgagcagcagataaatcagcaccgacccccacaaaatgttgtttataaaattcatcaggtccgtcaatggatccctcctcttatcgaaatttaatgcgcaccttgcagcatccaccgcaggtgaaaaacattggcctattttttacaagagcttagctggaatctgtccggcgtcagtcgattaagatttttcgcagattagcggacggattgcatcaattttttcgaatttaacataatttattcggacaatagcacgttattgcctttccatccgctcggtaatggcgaaagatatcggcgtaaacggttgctcgcccaaggataaaacagatgcttgtgcgccgcggttttccagccttgcaccgggcttggcgcatgttattatcagggtagggcatggttgaacaatgccaaaagttcatgcacaaacgatgagataatgccaacatgaccgacaaattaacttccctgcgccagctgaccacggtggttgcagatacgggtgatatcgcggcaatgaagctgtatcaaccgcaggacgccacaaccaacccttcgctgatcctcaatgcagcccaaattcctgaataccgcaaactgattgacgaagccatcgcctgggcgcgcggccagagcagcgatcgcgagcagcaaatcgccgatgccgccgacaagctggcggtcaacatcggtctggagatcctcaaactggttccgggccgcatctccaccgaagtggatgcacgcctgtcttacgacaccgttgccagcgtggccaaggccaagcgcctgatcaagctgtacaacgaagccggcatcagcaacgatcgcattctgatcaaactggcctcgacctggcagggcatccgcgcggcggagcagctggagaaagaaggcatcaactgtaacctgacgctgctgttctccttcgctcaggctcgcgcctgtgccgaagccggcgtttacctgatctcgccgttcgtcggccgtatcctcgactggtacaaagccaacggcgacaagaaagagttcgccccgcacgaagatccgggcgtgatctccgtgaccgaaatttaccagtattacaaacagcacggctacaacaccgtggtgatgggcgccagcttccgcaacgtcggcgaaatcatcgaactggccggctgcgaccgcctgaccatcgcccctgcgctgctgaaagagctggcggagagcgaaggcgcgctggagcgcaaactgtcttataccggtgaagtgaaggcgcgtcctgccgcactgaccgaacctgagttctactggcagcacaaccaggatccgatggcggtcgagaaactgaccgacggcatccgcaagttcgccgtagaccagggcaaactggaaaaaatgatcgccgacctgctgtaattcccgcagatcgcgcagtaaaaaggtggctcaggccacctttttttatgcccgacgcccctgccggcgggggaagcccttatactctcggcaatgacaacagaacgggggacgagcccgttcggaccccatcaggctgtagaggttacgcatggatattttacgtattggtttggtttccgtttccgaccgcgcttccggcggcgtttaccaggataaaggcattccggcgctggaggagtggctggccggcgcgctggcgacgccgttcaagctggaaacccggctgatccccgatgagcagacgcaaatagaacagacgctgtgcgagctggtggacgaaatgggctgccatctggtgctgaccactggcggcaccgggccggcgcgccgtgatgtcacccccgacgccacgctggcgatcgccgatcgcgtgatgcccggcttcggcgagcaaatgcgtcagatcagcctacactatgtgccaacggcaattctttctcgccaggtgggggcgatccgcaaacaggcgctgatcatcaacctgcccggccaaccgaagtcgatcaaggaaacgctggaaggggtaaaggatgagcagggcaatgcggtggtgcacggcatcttcgccagcgtgccttactgcattcagctgctcgacgggccttacgtcgaaacgcatgccgcagtggtagcagcatttcggccaaagagcgcgcgtcgcgagataaacctctaaatttcagcaatctgcgagatcggcttcaacccgtctggtgtgaaaataatttgccgctatagtaaggattcttttacagaaagcctgcggcttttatttttacagcctttaccgacggtgccctatgcctcacgacactaatcgccggctgaaccggcaagactacaaaacgctgacgttggccgcgttgggcggcgcgttggagttttacgacttcatcatcttcgtgttcttcgccgccgtggtcggcgatctgttcttcccggcggacatgccggaatggctgcggctggtgcaaaccttcggtatcttcgccgccggctatctggcccgcccgctgggcggcatcgtgatggcgcacttcggcgatctggtcggccgcaaaaagatgtttaccctgagcattctgctgatggcgttgccgacgctggcgatgggcctgctgccgacctacgccagcatcggcatcgccgcgccgctgttgctgctgctgatgcgcgtgctgcagggggcggcgatcggcggtgaggtgccgggtgcctgggtcttcgtcgccgaacacgtgccgcgccggcgcatcggcttcgcctgcggcacgctgaccgccgggctgacggtgggcatcctgctgggctcggtggtggcgacggtgatcaacaccacgctcagcccgcagagcattgccggcggcggctggcgtattccattcctgcttggcggcatgttcggcctggtggcgatgtacctgcgccgctggctgcaggaaacgccgatctttatcgagatgcaggcgcgtaaagcgctggccgaggagctgccgctgaaatcggtggtgctcaactacaaacgggaagtggcggtgtcgatgctgctgacctggctgctctccgccggcatcgtggtggtgatcctgatgaccccgacctatctgcaaaagcagttcggcatcgcgccggccttgacgctgcaggccaacagcatcgccaccatcatgttgatcgccggctgcatcgtcgccggtttgtcggccgatcgcttcggtgccagcaaaacgctggtggtcggcagtgtactgctggccggctgcagctggctgttctatcagacggtgggcgtgcgcccggaaatgctgttcgcctgttatgctctggtggggttcagcgtaggcgtggtgggggccgtaccgtacgtgatggtgcgggcattcccggcggaagtgcggtttaccggtatctcgttctcatataacgtctcgtacgctatttttggcggtttaacccctatttttgtgacgttgatcatgaaattaaccccgttagcgcccgcttactatgtgttggcgctgtcgctcatcgggctgctgctcggcttctacctgcatcgtgacctgaacagcgaagccggggagcggcgagccgattcctacagctaaaaaaaagccctgcagtgcagggctttttcatcaggggcgggcgattacgccgtgaccggtgaggccgcgacgcgcgccggagccggttcgccaatcggcagcacggtgcggccatactgctcgttgagtacttcggccatcgccaggtaaatggcgctggcgccgcagataatcccttcatagccggcgaaggtcagcagcgtgtggttgccggtgatgttgccgacggccagcagggcgaacagcagcgtcaggctggcgaacacgaactgcagcacgcggttggcgcccagggtgccgaagaacatgaacagggtgaagacgccccacagcgccaggtagatgcccagcacgtgggcctcggtggcctctgccaggcccagacgcggcagcagcagcaggccgaccaggctcagccagaagctgccgtaggcggtgaaggcggtcatgccgaaggtgttgcccttcttgtactccagcagtccggccaggatctgtgccaggccaccgaagaaaatccccatgctgatgatggcggagttcagtgggaaaaagcccgcgttgtgcaggttcagcaagacggtggtcatcccgaagcccatcaggccgagagggccgggattcgccaacttgttggtgtgcataagtcctctgcgataacagaaaattaacggaaacagcgaattaaaatcataaatggtctgaatggccaaaaaatcgaagttttccaccagagcgcgcgcatcataatgatccccgcaaccggaaacaatgatctgaatgacgataaaaaaagaaatttttttcgccttgccccttgatgccgggttggatggccccatcttatttgcaaccgcagctgctaaccgcgggtcgcactgagatatcgggcagttgaaaagcaaaaaatcgcccgcatataggttagcaacctgactgattatgaattttttagtggagacgtttagatgggcaaaattattggtatcgacctgggtacgaccaactcttgcgtagcaattatggatggtgccaaggcacgcgtgctggaaaacgccgagggcgaccgcaccactccttctattatcgcatatacccaggacggtgaaactctggttggccagccggctaagcgtcaggcagtcaccaaccctgaaaacaccctgttcgccatcaagcgcctgatcggtcgccgcttccaggatgaagaagcgcagcgcgacaaagcgatcatgccgtacaaaatcgtcgaagccgacaacggcgacgcctggctggaagtgaaaggccagaaaatggctccgccgcagatctctgcggaagtgctgaaaaaaatgaagaaaacggcggaagattacctgggcgaaccggtaactgaagcggttatcaccgtaccggcttacttcaacgacgcccagcgtcaggcgaccaaagacgccggccgcatcgcgggtctggaagtcaagcgcatcatcaacgaaccgaccgcggcggccctggcctatggcctggacaaagaagtcggcaaccgcaccatcgcggtttatgacctgggcggcggtactttcgatatctccatcatcgaaatcgacgacgttgacggcgaaaaaaccttcgaagtgctggcgaccaacggtgacacccacctgggtggcgaagacttcgacagccgtctgatcaactacctggtggaagagttcaagaaagatcagggcatcgatctgcgcaacgatccgctggcgatgcagcgtctgaaagaagccgctgagaaagcgaagatcgaactgtcttccgctcagcagaccgacgttaacctgccgtacatcactgcagacgcgaccggtccaaaacacatgaacatcaaagtgactcgcgccaaactcgagtcgctggttgaagatttggtggcgcgctccatcgagccgctgaaagtggcgctgaaagacgcaggcctgtcggtttccgacatccaggacgtgatcctggtgggcggccagacccgtatgccaatggtgcagaagaaagtcgcagacttcttcggcaaagagccgcgcaaagacgtgaacccggacgaagcggttgccgtgggcgctgcggtacagggcggcgtgttggccggtgatgtgaaagacgttctgctgctggacgtgaccccgctgtcgctgggtatcgaaaccatgggcagcgtgatgacgccgctgatcaccaaaaacaccactatcccgaccaagcacagccaggtgttctctactgcggaagacaaccagtctgcggtaaccatccacgtgctgcagggtgagcgtaagcgcgccagcgataacaaatctctgggccagttcaacctggacggcatccaggcggcgccgcgcggcatggcgcagatcgaagtgaccttcgatatcgatgccgacggcatcctgcacgtgtctgccaaagacaagaacaccggccgtgagcagaagatcaccatcaaggcatcttctggcctgaacgaagacgaaatccagaaaatggtgcgcgacgccgagctgaacgctgaagctgaccgcaagtttgaagagctggtacagactcgcaaccaggcggatcacctgatccacggcacgcgcaaacagctggaagaagcgggcgacaaactgccggcggaagacaaaacggcgatcgaagcggcgctgaaagatctggaagcggcggtgaaaggcgaagataaagccgagatcgaagcgaagacccaggcgttggtgcaggtttccggcaagctgctggaaatggctcaggcgcagcaggctcagcagggtgctgacgccggcgcggacaacgcggcgcagaaagacgacgacgtggttgacgccgagttcgaagaagttaaagacaaaaaataatcgcccttaagcgggcacggggcggccgaggtgccgctcccggaaaccagcacgggcgtcgaggcaactctgcgcccgtgcacgcatgttaagggtaagcgaaagaatggcgaagaaagactattacgagattctcggcgtcagcaagacggcggatgaacgtgagatcaaaaaggcgtacaaacgcctggcgatgaaataccatcctgaccgcaaccaggaacaagacgccgaaaccaagtttaaagaagttaaagaagcttacgaagtcctgaccgacgatcagaaacgcgcggcctacgaccagtatgggcacgcggcctttgagcagggcggcatgggcggcggcggctttggcggcggcgccgacttcagcgatatctttggcgacgtgtttggcgacatcttcggcggaggccgccgtcagcgcgccagccgcggttccgatctgcgctataacatggagctgaccctcgaggaagcggtacgtggcgtcaccaaagagatccgcatcccgacgctggaagagtgcgacgtctgccacggcagcggcgccaaaccgggcagttcgccggtcacctgtccaacctgtcacggccagggccaggtgcagatgcgtcagggcttcttcaccgtgcagcaggcgtgtccgcactgccatggccgcggccagatcatcaaagatccgtgcaacaagtgccacggccacggccgggtagaaaaatccaaaacgctgtcggtgaaaattccggccggcgtggataccggcgatcgtatccgcctggcgggtgaaggcgaagccggcgagcacggcgcaccggcgggcgatctgtacgttcaggtgcaggtgaaggcgcacccgatctttgagcgtgaaggcaacaacctgtactgtgaagtgccgatcaacttcgccatggcggcgctgggcggcgagattgaagtgccgacgctggacggccgggtgaaactgaaggtgccttcggagacccaaaccggcaagctgttccgcatgcgcggcaagggcgtgaaatcggtgcgtggcggcagccagggcgacctgctgtgccgcgtggtggtggaaaccccggtcaatctgaacgacaagcaaaagcagctgctgcgtgagctggaagagagcctgggtggcccgtccggcgacaagaacagcccgcgctcgaagagcttcttcgacggggtgaaaaagttctttgacgatctgactcgctaacctgctgtttctgttggtttatgtgcgaaccccgggcatctgtcccggggtttttatttgcgcgctaaaccgctaattccacaacgtaaatgtgacttattcgtgctttttatcggttttttcgagctatttagcatttataaacttattttttcgaactaaaacgccctctatactcacttcatgactgtggttcgcagggcgctatgtcctgcacagatttggagagacgtactgtgaccaacatcattcgtcaatttttacgtcaggaagccgcgggcggtatcattctgatcgcggcggcgatcgtcgccctgatcatggccaacaccccggcgcaggggatctatcaggcattccttaacctgccggtgatggtgaaggtagcttcgctggagatcgctaaaccgctgctgctgtggataaacgacggcctgatggccatcttcttcctggtggtggggctggaggtcaagcgcgagctgatgcaaggctcgctgtccgggcgcgacaaagcggtgtttccggcgatcgccgcgctgggcggcatgttggcgccggcgctgatttacctgctgttcaacggcgcggatgaagttacccgccagggttgggcgatcccggccgcgaccgacatcgcctttgcgctgggcgtcatggcgctgctgggcaaccgcgtgccaaccagcctgaaagtgttcctgttggcgctggcgatcatcgatgacctgggcgtgatcatcatcatcgcgctgttctacacccacgaagtgtcgatggtggcgctgggcgtggcggcggcggcgacggcgctgctggcggtgatgaactggcgcggcgtgggcaagacctcgctgtacatgatggtcggcctggtgctgtgggtggcgatcctcaagtccggggtgcatgcgacgctggccggggtgattgtcggctttatgatcccgttgaacgtcaaaaaggggccatcgccgtcggaaacgctggagcatgagctgcacccttgggtggcgttcatgatcctgccgctgttcgctttcgccaacgccggggtctctttgcagggcgtatcgctggagggattgacgtcgctgctgccggtcgggattgcggctggcctgtttatcggcaagccgctggggattttcctcttcagcctgctggcggtgaaaatgggcatcgcccgtttgcctgaaggtatcggcttcaaacaggtgtttgccgtttcggtgctttgcggcattggttttaccatgtcgatttttatcgcctcgctggcgttcggcgatgcggatgcggcgctcagcacctattcccgcctggggatcctgttgggctccaccactgcggcggtggtagggtatggattactgcgtctggcgttgccgcgcgtgcgttaatcctgaatgtgcccggtaagggcacataataaaatggctggtcggagctgtacggtataaaatatgtgcagcttcggccgttcttcgttgggactaatggggctatacgttgtctgaagcagggaaaggaagtttgtcgctcgtcacggcacaccgtttgccgctgcgaaacgttgttaaggagagccgctcgtgaggatgtcgcatatcaactttaatcacctttactatttctggcaggtctgcaaggccggttccgtggtcggtgccgccgaagcgttgtttctgacgccgcagaccatcaccggccagatcaaagcgctggaagagcggttggacggcaagctgttcaaacgccaggggcgcgggttggtgccttcggagctggggcagctggtgttccgctatgccgacaagatgttcatgctcagccaggaaatgctggatatcgtcaactaccgcaaagagtccaacctgttgttcgacgtcggcgtggcggacgcgctgtcgaagcggctggtcagccaggtattggaaacggcggtggtggtggacaacgagcagatccacctgcgttgctttgaatcgacgcacgagatgctgctggagcagctcagccagcacaagctggatatgatcctgtcggattgcccggtggactccagccagcaggaagggctgttctcgctgaagctgggcgagtgcggcatcagctttttctgtcgccagccggcgccggagctgccgtttccggcctgtctggagcagcgcaagctgctgatccccggccgtcgttcgatgttggggcgcaagctgctcaactggttcaatacgcagggtattcaggtggaaattctgggcgagttcgacgatgcggcgctgatgaaggccttcggcatgtaccacaatgcgatcttcgtggcgccgacgctgtatgcgcaggatacctacaacgatgacaacgtggtggagattgggcgcatcgacagcgtgcaggaggagtattacatcatcttcgccgagcgcatgatccagcatccggcggtgcagcgcgtctgcaacaaagacttctcggcgctgttttcctgctagcggttcactgaacgcaggacgtaaaaaaaccggcctgagccggtttttttatcaagcagataacgaaatgcttattgcattgcgttgatgcgtgcagtcaggtttgacttatgacgcgctgctttgtttttgtggatcaggcctttagctgcctgacggtccaccagtggctgcattaccaggaatgcattttgtgctgcttctttgtcgccagctgcgatagctgcgtctaccttcttgatgaaggtacgcaccattgagcgacggcttgcgttatgcttgcggcgtttctcagactgtacggcgcgtttcttagctgatttgatattagccaaggtccaactcccaaatatattctattgaggacaattcaaaggccgaggaatatgcccttttagccttcgtttgtcaatggatttgtgcaaataagcgccgtttgtacaggcggcactcgctacgttgtgatggcgcaggattttaccagcttcgctcttgggaatacagtgtttcgcgagaaaattcgccaatgatttgccgcggcgggcgcaagccgttggccgcggtcgagaatcgccccggcagcgccggataaactgtggcgaagccgtttcacgcacagattatctccggtatggtatgtctattacataaaggcaccaatcgcgggttaaccttaccggctgtacaaggtataatccgccgatttccactgttttgagccagctatggagctaattcgcggcattcacaatatccgggcgcgccaccatggttgcgtgctcaccatcggcaactttgacggcgtgcatcgcggccatcaggcgttgctggaacagttgaagcaacaggggaaacgcctcgggctgccggtgatggtcatgatctttgagccgcagccgctggagatgttcgccgcagacaaagcgccggcccgcttgacgcgcctgcgcgacaaggccaactatctggcgcaggcgggcgtcgattacctgctgtgcgtcaagttcgatccgcgtttcgccgccaacaccgcgcaggcgttcgtcgccgagctgctggtggaaaaactgggcgtcaaattcctgatggtgggggatgattttcgctttggcgccgggcgtcagggcgattttccgctattgcagcaggccggaaaagagtacggcttcgacgtggtcagcaccccgaccttccgcgaaggcgagcggcgcatcagcagcaccgcgatccgcaccgcgctgagcgaggacgatctgccgctggcggagaccctgctgggccacccgtacagcatttccgggcgcgtggtgcacggcgacgagctggggcgcaccatcggcttcccgactgccaatttgccgctcaagcgtctggtggcaccggtgaaaggagtgtatgcggtggaagtgtacggcctggggcctaagccgctgccgggcgtggccaatatcggcacgcgcccgaccgtcgccggcgtgcgccagcagctggaagtgcatctgctggatgtcacaatggatctttacgggcgccatattgaggtggtgctccgcgcaaaattgcgcaatgaacagcggtttgcttcgctcgatgccctgaagcagcaaatcgccaatgatgtggtgacggcccggaagttcttcgggttaaaaacactggtttaatcgtttaccctaaacaattcgagttgcatcgcggcggcaaccgcgcgaaccccgatgagcttgcataggcaagtgattcgggtgagaaagggcggccgacaaagatgcagcttgaagtgtgacgggtaaatagccgaaaacggaaacgagaatctcatgagtgactacaagaataccctgaacttgccggaaacagggttcccgatgcgcggcgatctcgccaagcgcgaacctggcatgctgcaacgttggtatgaacaggatctgtacgggattattcgtactgccaaaaagggcaaaaaaaccttcattttgcatgacggccctccgtatgcgaacggcagcattcacattggtcactcggttaacaagattctcaaagacattatcatcaagtcgaaagggatggccggcttcgactcgccttatgtgccgggttgggactgccacggcctgccgatcgaactgaaggttgagcaactgtacggcaagccgggcgagaagctgacggcggccgagttccgccagaagtgccgcgagtacgcggccgagcaggttgaaggccagaagaaggacttcatccgtctgggcgtgttgggcgactgggatcgtccgtacctgacgatggacttcaaaaccgaagccaacatcatccgcgcgctgggcaagatcatcagcaacggccacctgctgaaaggcgccaagccggttcactggtgcaccgactgcggctcgtcgctggcggaagcggaagtggagtactacgacaagacttcgccgtcgatcgacgtgagcttccatgcggccgacgcggctgccgtggcggccaagttcggcgtgagccacttcaacggcgccatctcgctggttatttggaccaccacgccgtggaccttgccggccaaccgtgcgatctcgctgcacccggatttcacctatcagctggtgcaggttgacggccagtgcctgatcctggcggccgaactggtggaaagcgtgatgaaacgcgccggcatcaccgagtggacggtgctgggcagctgcaaaggcgccgatctggagctgctgcgcttcaaacacccgtttatggacttcgacgtgccggcaatcctcggcgagcatgtgaccctggacgccggtaccggtgcggtgcataccgcgccgggccacggcccggacgacttcgtgatcggccagaaatacggcctggaagtggccaacccggtagggccgaacggctgctacctgaccggcacctacccgctgctggacggcaagttcgtcttcaaggccaacgatctgatcgtcgatctgctgcgtgacaaaggcgcgctgctgcacgtcgagaagttcctgcacagctatccgtgctgctggcgccacaagacgccgatcatcttccgcgccacgccgcaatggttcatcagcatggatcagaaaggcctgcgtcagcagtcgctggaagagatcaagggcgtgcagtggatcccggattggggccaggcgcgcatcgaaatgatggtcgccaaccgcccggactggtgcatctcgcgtcagcgcacctggggcgtgccgatgtcgctgttcgtgcataaagagaccgaacagctgcacccgcgcagcgttgagctgatggaagaagtggccaaacgcgtcgagcaagacggcattcaggcctggtgggatctggacgcggccgacatcctcggcgcggaagccgccgactacgtgaaagtgccggatacgctggacgtgtggttcgattccggttccacccacgcctcggttgtcgacgtgcgtcctgaattcaacggccacggcgccgacatgtatctggaaggctccgaccaacaccgcggctggttcatgtcatcgctgatgatctccaccgcgatgaagggcaaggcgccgtacaaggaagtgctgacccacggcttcaccgtcgacggccagggccgcaagatgtccaagtcgatcggcaacaccgtcagcccgcaggacgtgatgaacaagctgggcggcgacattctgcgtctgtgggtggcgtcgaccgactacaccggcgagatcgcggtgtccgacgagatcctcaagcgttctgccgactcttatcgccgcatccgcaacaccgcgcgcttcctgctggccaacctgaacgggttcgagccgagcaccgattgcgtggcgccggaagacatggtggtgctggatcgttgggcggtcggccgtgcgctggcggcgcagcaggatatcgagcaggcttatgccaactacgatttccacgaagtggtgcagcgtctgatgcagttctgttcggtcgagatgggctcgttctatctggatatcatcaaggatcgccagtacaccgccaagagcgacagcgtcgcccgccgcagctgccagaccgcgctgtatcatatcgtggaagcgctggtgcgctggatggcgccgatcatgtcgttcaccgcagacgagatctggggcttcatgccgggcaaacgcgcgcagtacgtgttcactgaagagtggtacgacggcctgttcgggctggcggaaggcgagccgatgaacgacgctttctgggctgagctgctgaaagtgcgcggtgaagtgaacaaggtgctggagcaggcgcgtgccgacaaacgcctcggcggttcgctggaagcggcggtgacgctgtatgccgacagcgagttggcggcgcgtctgaacagcctgcaggatgagctgcgctttgtgctgctgacctctgcggcaagcgttgcgccattggcggatgcgccggccgatgcgcaggcctccgagctgttgaaagggctgaagatcgccttcagcacagcgccaggtgagaagtgcccgcgctgctggcattacaccaccgatatcggcctggtggcggagcatgcagacatctgcggccgctgtgtgagcaacgtcgccggtgacggcgagaagcgtaactttgcctgagaacttgcgcctgatgagtaaaccaatttgttcgaccggcctgcgttggctgtgggttgtggtggcggtgctggcgctggatttcggcagcaaacagtggatcctcgctaactttacgctgggccagtcccagccgttgatcccgtcgttcaacctgttttacgcgcgcaactacggcgccgcgttcagcttcctggccgaccatggcggctggcagcgctggttctttgccggcatcgccatcgccatcgtcgcggtgctgctggtgatgatgtaccgcagcaccgcgcagcagaagctgaacaacatcgcctacgcctttattatcggcggggcgttgggcaacctgttcgatcgcctgtggcacggtttcgtggtcgacttcatcgacttctacgtcggtgattggcactacccgacctttaatctggcggacagctttatctgcgtgggtgcggcgatgatcgtgctggaaggtttcctgtcgccggcgagcaaaggcgcaaagagtaaaggtgagtaatatgacggctcaggttatcagtgacagcgcggtgctggttcacttcacgctgaaactggaagacggttcgaccgccgaatccacccgcagcagcggcaaaccggcgctgttccgcctgggtgacggcagcctgtcggcgccgctggaagagcaactgctcggcctgcgcgcgggcgacaagtgcgcctttaccctgcagccggaagcggcgttcggcgcggagaacccggatctggtccagttcttctcgcgccgcgacttcgcggaaaccggcgtgccggacgtgggcaccatcatgctgtttaccgccatcgacggcagtgaaatgccgggcgtggtgcgcgcagtggcggaagattcgatcaccgtcgatttcaaccatccgctggcgggtcatccggtgaccttcgacatcgaagtgctggagatcgatccgcagcaggaggagacgcatgcaaatattgctggctaacccgcgcggcttctgcgccggggttgatcgtgcgatcagcatcgtggaacgcgcgctggagctgtatggcgcgccgatctacgtgcgacatgaagtggtgcacaaccgctacgtggtcgacagcctgcgtgagcgcggcgcggtgtttatcgaagagatcgccgaagtgccggacggctctatcctgatcttttcggcgcacggcgtgtctcaagccgtgcgcgccgaagccaaggcgcgcgatctgaccatgctgttcgacgccacctgtccgctggtgaccaaggtgcatatggaagtggcgcgcgccagccgccgcggcaccgaagcgattctgatcggtcacgccgggcacccggaggtggaaggcaccatgggccagtacagcaatccgcagggcggcatgtacctggtcgagtcgccggatgacgtgtggaagctgcaggtgaaagacgaaaacaacctgtgcttcatgacgcagaccacgctgtcggtggatgatacctcggacgtaatagacgcgctgcgtcaacgcttcccgagcattatcggtccgcgcaaggatgacatttgctacgccaccaccaaccgtcaggaagcggtgcgcaacctggccggcgatgcggacgtggtgctggtggtggggtcgaagaactcctccaactctaaccgtctggcggaactggcgcagcgcgttggaaaaccggcttatctgatcgattcggcggcggatattcaggaaagctggctgagcgaagcgcgcaatatcggcgttaccgccggcgcctcggcaccggatgtactggtgcaggaggtgatctcccgcctgaaagcgctgggcggcctggacgtgcatgaaatcagcgggcgtgaagagaacatcgtgttcgaagtgccgaaagagctacgcgtggacgtccgtcagattgactgaggtgcgtgagtgaatgacaacggggagcttaggcttcccgttttttttggaatgccaacggcattaaaaataaaatgctgagtatattcaaattttctgctaactaaagtcaaatttattctgagtatttgaaatagcggtggcgtcattaattatatagactgaatgaagtcattaaatagaatatcattaggctgcaatctaaatagggcctggtgtcgtcaacgtgattacaataattacaatagtagtcttgcagatgtttcttattttattcttgtcgaatctgttctaggtcgtttaatcctttctcctttaaatagagcttcatatgctccagcaatcgccggacttttaatggctggatctcccgtctcggcataatggcatagcaattaatttccggtaatcgccagtcgggcaatatttcaatcagctcgccgctgcgcaactctcgctcgacgttggcgaagaaattgcgaatgatgcctttgccggtcagcgccagctccttcatcgccatgccgctgttggtgaacagtcgcccggtcatgcgcatgcggtgctcgccgccgtcgcgatggatcaggcgaacaaactgcggattgccgagcggcgtaaaggtgacccaatgatgatgggtcagcgcctgaggcgaatccggcaccccgtggtgtgccagataggctggggacgcgcacagcacttcgcggcagcgcgccagccgcgttgagacgtagctggagtcagccagcgcgccgccgcgtattgccagatcgatgcgttgcgcgatgaggtctattctctcatcgtggatttccaaccgcagcgtgatgcgcgggtgttcgtcgaggaagctctgcagcgccggcaccagataatgggtggcgaattcggtcgaggtggcgacgcgcagttcaccgaccagctcaccgcgcagcgcggcgatccgctgttgcccgcgctcggcggcgtggatcatcagcagacaatcttcataaaagcacaatccggcttcggtcaggctcaatgagcgcgtcgatcgcaacagtaattgaatgcccagatgttcctccagctggcgaatatgctggctgacggccgatgtcgtcatgcccaattcttttgccgccatgctgaatgcgccacaatcgaccacttttgagaaaatggccatgcgttttaaaatattgctcatagtttgttaagcacaacttaacctagattgtgatttatacgggctaataatatagcaccatctttcctatattgcctgaagcatataaacgacgggctgattattattttgcatgcgttttatctctttttgataaatcttattgcgcttgccaataatacacccgcgccacatcgcaacaggagctcattgtggatagcgcacagaaaaaagaagaaatagcattaaaaatcctacgtgaattattgcaatatcgacgtcgcctcatcgccgacgatgcttctctggctgaagaagagcggcaggtcactcaggtgcaattgccgcgcattcgggcattcattgaaaacgaccagcgcatcgaattcgtgctgccggcttttccgaccaagtcacccaacgccaataaggtgataggcgcggtgccggacatggcggagcggctgtcgctgatcttcctcaactcgctgtgccagcgtattcaactctattacccgccgggcgcgcatatcgttatctgttccgacggccacgtgttcggcgatctgatccgcgtcagcgacgaagcgatcaaccattatcaacgcgagattgaaagcctgctgcatgaagtgggcgcaacccacctgagcgtgttcaacctcggcgatgtcaaaggcctggcggagcataccgatgactacgatctgctgcgccggctgttggtggacggttatgccgaatcggaagaggcgatcaagcgccagctgatgcaggacgagcagggattaatgctgtatcgcgccatcacgcgcttcttgtatgaagacagcctcctgccgggctacagcggttccaacgccgcgctgcaaaaagacgccaaacggcgcgcctgcggcgttatccagcgcagctgggcctggggcaacctgctggcccagcatttcccggcggcgatccgcctgtcgattcacccgcagccggccgacagcctgaagataggcatccacatgatgccgaccaaagacgactggctgacgccgtggcatggcgtggcagccaacgtgaacggccagttcgtgctgatgaagcgtaaagatgcgcagagcctggacggcgaattggtggagatccgcggcacgccgagccattacctgatcgaacaaccgcagatggcctgaggccgctgcaggcttttgcgcccgaaatcctggcggacgcgtttttgacggcacgttgccgtgtgagcagcacattcgatgcaaggagaatcaccgatgaataaccaaccgcttaattgccatattcaaccgaataccccgttcggcgcgatcctgacgccgcagcatccggggcaaaagatcggcgaactgccggtggcagcgctgcgggcgctggcgcaggagcatcacttgctggtgctgcgcggattcgactccggttttagcgatggggaggttttgacgcgctacgccgagcagtggggcgagatcatgatgtggccgtttggcgcggtgctggacgtgaaggaacatccggacgccaaggatcatattttcgacagcagctacgtcccgctgcattgggatggcatgtataagccgactattcccgagttccagctgttccactgcgtggcggcgccgtcgccggacgaaggcgggtgcactaccttcgtcgacaccacgcgcttgctggccaatgcggacgaagcgttgctggatcagtggctgtcggtctcgatcacctaccgcatcaagcaggtggtgcactacggcggtgaagtctgttcgccgctggtggtgcagcacccgaacggcaggggcttgatcatgcgctacaatgaaccgccgacggaggggaaaaaattcctcaatcaacatgcgctggaatatcacggcgtgccggaacaacagcaggaacagttccaccacactctgcagcagcatctgtacgatccgcgtcactattatgcccaccaatggcaacagggtgacgtggtggtggcggacaacttctcgctgttgcacggccgcgagggctttaccgcccgttccgcgcgtcatttgcagcgcgtgcatattcaaagcaatccggtgtgcgccaatctggcgctgaagccggctaacacagaagcgtaaaggagcattatggcaaggatattgatggcggcagtcgccactccggggcacgtttacccgatgttggccatcgctcgacacctgattgcccaagggcatcaggtgcggatgatgaccggcgcgctgtttcgcgaacgcgccgaggcggcgggcgcgagcttcgtgccgttcgacgcgcaggtggatttcgattaccgccacctggagcagcacttccccgagcgcgccgccctgccgccgggcaatgcacagatggcgctggcgctgaaagatttcttcgccgcgccgatcccgctgctggatcggcaactgcgtgcgactatcgctgccgaagacaccgatctgctgatggtggagaactgcttctacggcgtgctgccgctgctgcagtctgccgaacggccgccggtcttcggtatcggcgttacgccgctgtcgtattcttcgcgcgatgctattttttatggcccgcgcatcccgccggcgctgctgccgcaggcgttgacccgtgagcagctggtggatgaagaaacgcgcgtgctgctcgatgaagtacagcagagcttcgatgcggcgctggtgcaggcgggcgggcgggcgctggatcgcccgttcaccgacgcgctgatcggcggctgcgagcgtttcctgcagctggctaccacggcgctggaatatgagcgcgacgatctgccgagcggcgtgcgcttcgtcgggccgctgcgcagcggtggtcaaccggccgcggaagaggcgctgtgggaggaggacgatcgtcggccgctggtgatcgtgtctcagggcacgctggccaatgtcgatctgcatcagctgatcgtgccgacgctgcaggcgctggcgcatctgccggtgcgggtgttggccaccaccggcgggcgggcgacggaaggactgatggacgcgctgccggccaatgccagagtgcgggagtttatctccttcgaacgctggttgccggagacggcgctgctgatcaccaacggcggttacggctcgatcaactatgcgctgaacagcggcgtgccgctgatcgtcgccggcaccggcgaggacaagctggaggcggccgcgcgcgtggtggccgccggctgcggcatcagcctgcataccagcacgccaagctccgaacaaatactggcggcagcgacgcgcattctgcaacagccgatctatcgccggcgcgcggcgctggtgcgtgaggactatgcccgccacgatgcgctgacggcgatcgccaacgaagtggccgccattaccgcctgacatcgccgcactccgttcctcaggcgccgttttcggcgccttttttctgcatttttttgccatggaaactgcatgattatgtacaatcgtcgcaggccgccaaatcggttgaatgttaatctcacgacagcgccgctgatgaaagcgggggaatatcataattttctaattatgaaatgaatcctctggcggcgctgcagcggggcagttaccctgaatcgatagcctaatgggataggcgtcaaatcaagaagagagcgagcatgagtgattcacaaatccgcattgcgattgcgggcgccggcggccggatgggccgtcagttgatccaggcggtgcagcaggcggaaggcgtggtgttgggcgcggcgctgtcgcgcccgggttcaagcctgatcggcgtcgatgccggcgagttggcgggcattggcgcgctgggcgtcaaggtaagcgacagcctggataaagtggcgagcgagttcgacattttgatcgacttcacccgcccggaaagcacgcggaactacctggatttttgcgtggcgcaccacaaggcgatggtgattggcaccaccggcttcgatgacgcgggcaagcaggcgatccgcgctgcggcgcagcatatcggcatcgtgttcgccgccaacttcagcgtcggcgtcaacctggtgctgaaactgctggagaaggccgcgcaggtgatgggcgactataccgatatcgaaatcgtcgaggcgcaccaccgccacaaagtggatgcgccgtcgggcacggcgttggcgatgggcgaagcgatcgccggcgcgctggggcgcgatctgaaaagctgtgcggtctatgcgcgcgaaggccataccggcgagcgcgatccgaagagcatcggctttgccaccattcgcgccggcgacatcgtcggcgagcacaccgcgatgttcgccgacatcggtgaacgggtggaaattacccataaggcttccagccgcatgacttttgccagcggtgcggtgcgcgcggctgcctggctgcataaccgggataaaggtttatctgatatgcgagacgtgttgaatttggaccagttataattgatttgcataccatcgtgatgtggttgtattgatcataatgctatgataatcgggcaataattttattgtccttttttttaacatgataaatatcatgttgattttatttcattgccaaagctgttatttgtctgtgtttactttgctaatcatctcctttttttccaccctcggcttttttagcgtcttttttgtcccattccggcgctattttccgtcattcttccccgcaaccgttttccagccccggttttctgtgtttttatcgccgctcaagccgcatgagcgccgagaactgcaaaaataaaacaaaaaacggcagtttgggtagacaagccaggcactcatcattaaaatgcgcccaatttgccaaaaattggcctcgcggacggtttttgcattgatttagatcgcgatatctgaattaatatgcaaatattgtgattgattattccttggagggtgttttgataaagtcagcgctattggttctggaagacggaacccaattccacggtcgggccatcggggcagagggaacggcagtgggggaagtggtcttcaatacgtcgatgaccggttatcaagaaatcctcactgatccttcctattcccgccagatcgttactcttacttatcctcatatcggcaatgtcggcaccaatgcttccgacgaagaatcctccgcagtacacgcccaaggcctcgtcattcgtgacctcccgctgatcgccagcaactaccgcaatgaagaaagcctgtccgactacctcaagcgtcacaacatcgtggcgatcgccgatattgatacccgtaaattgactcgcctgctgcgcgaaaaaggcgcccagaacggctgcatcatcgccgccgattcgccggacgccgcgctggccctggccaaggcgcaaggtttcccggggttgaagggcatggatctggcgaaagaggtcaccacccaagaggcctacagctggcagcaaggcagctggacgcttgaaggcgacctgcccgaagccaaaaccgccgcggaactgccgttccacgtggtggcttacgactacggcgccaagcgcaacatcctgcgcatgctggtggatcgcggctgccgcctgaccgtggtgccggcgcagaccccggccgacgaggtgctgaaaatgaatccggacggcatcttcctgtccaacggcccgggcgatccggagccgtgcgactacgccatcaccgccatcaaacagttcctggaaaccgacattccggtgtttggcatctgcctgggccaccagctgctggcgctggccagcggggcgaaaaccatgaagatgaagctcggccaccacggcggcaaccacccggtgaaggatctggacaacaacaccgtgatgatcaccgcgcagaaccacggctttgcggtcgatgagaacaatctgccggcgaacctgcgtgtgacgcacaaatcgctgttcgaccacacggtgcagggcattcaccgcaccgacaaagcggcgttcagcttccagggccacccggaagccagcccaggcccgcacgacgccgcgccgctgttcgatcactttatcgaactgattgagacttaccgttctaacgccaaataatcaggagcagtaaaaaatgccaaaacgtacagacataaaaagcatcctgatcctcggcgctggcccgatcgttatcggccaggcgtgtgagttcgactactcgggtgcccaggcgtgtaaagcgctgcgcgaggagggttaccgcgtcattctggtcaactccaacccggcgaccatcatgaccgacccggaaatggccgatgcgacctacattgagccgatccactgggaagtggtgcgcaagatcatcgaaaaagagcgcccggatgcggtgctgccgaccatgggcggccagacggcgctgaactgcgcgctggaactggagcgtcagggcgtgctggccgagttcggcgttaccatgatcggcgccaccgccgatgcgattgacaaggccgaagaccgtcgccgtttcgacgtggcgatgaagaaaatcggtctggataccgcgcgttccggcatcgcgcacaccatggaagaagcgctggcggtggccgctgacgtcggcttcccgtgcatcatccgtccttcctttaccatgggcggcaccggcggcggcatcgcctacaaccgcgaagagttcgaagagatctgcgaacgcggtctggatctgtcgccgaccaacgagctgctgatcgacgaatcgctgatcggttggaaagagtacgagatggaagtggtgcgtgataagaacgacaactgcatcatcgtctgctccatcgaaaacttcgacgccatgggcatccacaccggcgactcgatcaccgtcgcgccggcccagaccctgaccgacaaggaataccaaatcatgcgcaacgcctcgatggcggtgctgcgtgagatcggcgtcgaaaccggcggctccaacgtgcagttctcggtcaacccgaaaaccggccgcctgatcgttatcgaaatgaatccgcgcgtgtcgcgctcttcggcgctggcgtcgaaagccaccggcttcccgatcgccaagattgccgccaagctggcggtgggctacaccctcgatgagctgatgaacgacatcaccggcggccgcaccccggcgtcgttcgagccgtccatcgactacgtcgtgaccaagatcccgcgcttcaacttcgagaagttcgccggcgccaacgatcgcctgactacccagatgaagtcggtcggtgaagtgatggccatcggccgcacccagcaggagtcgctgcagaaagcgctgcgcggcctggaagtgggcgccaccggtttcgacccgaaagtgagcctggacgatccggaagcgctgaccaaaatccgccgcgagctgaaagacgccggttccgaccgcatctggtacatcgccgacgccttccgcgccggtttgtcggtagacggcgtgttcaacctgaccaacgtcgaccgctggttcctggtgcagattgaagagctggtgcgcctggaagagcaggtggccgacgcgggcatcaacggcctgaaccaagagttcctgcgcaccctgaagcgcaaaggcttcgccgatgcgcgtctggccaagctggccggcgtcgccgagagcgaaattcgcaagctgcgccacagctacggcctgcatccggtctacaagcgcgtggatacctgcgcggcggaattcgccaccgacaccgcctacatgtactccacctatgaagaagagtgcgaatccaacccgaccaacgaccggccgaaagtgatggtgctgggcggcgggccgaaccgtatcggccagggcatcgagttcgactactgctgcgtgcacgcctcgctggcgctgcgcgaagacggctacgagaccatcatggtcaactgtaacccggaaaccgtctccaccgactacgacacctcagaccgcctgtactttgagccggtgaccctggaagacgtgctggaaatcgtgcgcatcgagaaaccgaagggcgttatcgtgcagtacggcggccagaccccgctgaagctggcgcgcgagctggaagccgcaggcgtgccgatcatcggcaccagcccggacgccatcgaccgcgccgaagaccgcgaacgcttccagcaggcggtcaaccgcctgggcctgaagcagccggccaacgccaccgtcaccgccatcgaacaggcggtggagaaggcggcgggcatcggttatccgctggtggtgcgtccttcctacgtgctgggtggccgggcgatggaaatcgtctatgacgaaaccgacctgcgccgctacttccagaccgcggtcagcgtgtccaacgatgcgccggtgttgctggaccgcttcctggacgatgcggtggaagtggacgtcgatgctatctgcgacggcgagcgcgtgctgattggcggcatcatggagcacatcgagcaggcgggcgtgcactccggcgactccgcgtgttcgctgccggcgtacaccctgagccaggaaattcaggacgtgatgcgtcgtcaggtggaaaaactggcgttcgagctgcaggtgcgcggcctgatgaacgtgcagttcgcggtgaaagacaacgaagtctacctgattgaagtcaacccgcgcgccgcgcgcaccgtgccgttcgtctccaaagcgaccggcgtgccgctggccaaagtggccgcgcgcgtgatggcgggcaaaacgctggccgagcagggcgtgaccgaagagatcatcccgccgtactattcggtgaaagaagtggtgctgccgttcaacaaattcccgggcgtcgacccgattctggggccggaaatgcgctctaccggggaagtgatgggcgtgggccgcaccttcgcagaagccttctccaaagcgatgctgggcagcaactcgggcatgaagaagcagggccgcgcgctgctgtcggtgcgtgaaggcgataaagcccgcgtggtcgatttggccgccagcctgctgaagcagggcttcgagctggacgccacccacggcaccgcagtggtactgggcgaagcgggcatcaacccacgcctggtcaacaaggtgcacgaagggcgtccgcacattcaggaccgtatcaagaacggcgagtacacctacatcgtcaacaccacggcaggccgtcaggcgattgaggactccaagctgattcgccgcagcgccctgcagtacaaggtgcactacgacaccacgctgaacggcggcttcgccaccgcgatggcgctgaaagcggatccgaccgagcaggtgacgtcggtgcaggaaatgcacgcgcgcatcggcaagtaaccgcgcgataacgcaacgtaaggggcgctgcagatgcagcgcccttttttattcagtgaatttgtaggctggcgttaaaaatttccgctatcaatcagtgggcaaactgtcactctgtgtgattggtatatgcttggtgtattggcaaggaacgaaggaacgacgataacaatgattctgataatttatgctcacccgtatccccggcattcgcatgccaatcaccgcctgctgcaggcggtgaaggatctccccgaggtggaggtgcgctcgctgtatgagctgtaccccgatttcaatatcgacatcaacgccgagcagcgggcggtggagcgcgccgacctggtggtgctgcaacatccgatgcagtggtacagcttcccgccgttgttgaagctgtggatcgacaaagtgctggagcacggctgggcctacggccacgacggcaatgcgctggtgggcaaagactgcctgtgggcggtgaccagcggcggcgacgagcaccacttcgagctgggcgacttccccaacttcgccgcgctggcgcagccgctgcaggccacggcgatctattgcggcatgacctggctgccttatttcgccgtgcacaatacctttacctgcaacgagccagcgctgcttgccgccggcgaagcctaccgccagcggctggtcgactacctgatggaacatgccgaagcggaaacccgggaggccagccatggataatcaccacgtgatgatcgaagggctgatctacctcggctccgcggcgctgtttgtgccgatcgcggtgcgcctgggactgggttcggtgctcggctacctgatcgccggctgcatcattggcccctgggggctgaagctggtgtcggacgccgaatcgatcctgacctttgccgagatcggcgtggtgctgatgctgtttatcatcggcctggagctggatcctaaacggctgtggacgctgcgtgcctcggtgttcggcggcggcagcattcagatggtgggctgcggcctggcgctgagcgccttctgttacttccttggccttaactggaaggtggcgctgctgatcggtttgacgctggcgctctcatccaccgccattgccatgcaggcgatgagcgaacgcaatctgacgccgtcgccgatcggccgcagcgcgtttgcggtgctgctgttccaggatatcgcggcgatcccgctggtggcgatgatcccgctgctggccagcagcggcgccaccaccacgctgggcgctttcatgctgtcggcggccaaggtggtgggcgcgttgacgatggtggtgttgcttggccgctacgtcacccgcccgctgctgcacttcgtcgcccgttcgggcatgcgcgaagtgttcagcgccgtggcgttgttcctggtgttcggcttcggcatcctgctggagatggccggactgtcgatggcgatgggggcgttcctcgccggggtgctgttggcgagctcggaataccgccacgcgctggagagcgatattcagccgttcaagggattgctgctggggctgttcttcatcggcgtcggcatgtcgatcgacttcggcacgctgttccatcatccgttgctgatcgcctcgctgctgctgggctttatgctgatcaaggcggcgttgctgtggctgattgggccgctgctcggcgtgccgaagcgccagcgcggcctgttcgccattctgctggggcagggcagtgagttcgccttcgtgattttcagcgccgcacagctggccggcgtcttgccggttgaatgggccaagtcgctgacgctggcggtggcgctgtcgatggcggccaccccgctgctgttggtgatcgccgcgcagctggagaaaaatgcgccgaaagaggatcgcccggctgacgtcattgatgacgagaatgccagcgtgatcatcgccggcttcggccgtttcggccagatcgccggtcgtttgttattggccaacggcgtgcacaccgtggtactggatcacgatccggaccatatcgaaacgctgcgtaaattcgacaccaaggtgttctacggcgacgccacgcgcgccgatctgctggaggccgccggcgtcgctcacgccaaggtgctgatcaacgccatcgacgacgtggaagacagcctggcgttaaccgagctggccaggcagcacttcccgcatcttaaggtggtggcgcgggcgcgcgacgtcgatcactggtatcagctgcggcagttgggggtggaaaaaccggagcgcgaaaccttcgaaagctcgctgcgcgtcggccgtgaaacgctggagttgctggggctggacgcctatgaggcgcgcgagaaagcggacacgttccgtcgctataacctgaagatgctggaagatacgctggataattaccaggatactgaattccgtatcgccagcctgcagcgggccaaggagatgctcagcgcggccatcgagcaggatcagaatcggctggcgcgggtgcagcagaccggctggcgcggcagtatcgacggcaaggcgccggaggatgaagtggtggaagccaaaggataaggggaggggcgccgtgatggcgcccctttttttgcttagctcagcgcgaccttgatgcctaaggcgatcaacatgccgcccagcaatttgtcgacgatcttctgcgtcttttccagcccgcggcgcaccggcccgctctggatcaaaaataccagcagcggccaccagatgaccgacaggccgagaataatccccgcgtaccacagcttgtcacccagaccggaatcgatctgcagcacctgggtgaagaccgccaggaagaacagggtggctttcggattcagcaggttgcacaggtagccttgcgcaaaggcgctcttcaggctgacctgctgctgcggcagattgctgacgttcattttgccgccgccgcgcgacagcagcgcctggatgccgatccacaccagatagaccgccccggcgtatttcagcaggttgaacagccacggcgtggtggtgatcaccaccgccagcccggcgacgcagtaggacatgtgggtggcgacgccgcagatcacgccgaaggcggtcatcatggcggccagccgcgggtagcgggcggcgtttttgatcaccaggaaaaaatccgggccgggggagagcatgccgagggcggcaatgccggcgacgaacaacgaagtttcaagcatgggagacgtctcgcgcaaaaggcagcaatctggcgataataacgccgcttcctctgatgcgcatcaatccaatgaggtattgttaggctctatgataatacttcatctaccgcccgcgacggagcaccatgcagcagactaccgccacagacaggccggaaccgcaccggcaacagcgtgaaatcacccgactgtgcattcaatgcgcgttgctgctgttgcagcacggcgccgagagcacggtggtggaacagttatcaactcgcctgggactggcgctgggcatggacagcgtggaaagctcgatctccgccaatgcggtggtattgaccactcttagccatggtgcctgtctgaccaccacccgtaagaacgtcgatcgcggcatcaatatgcaggtggtgaccgaagtgcagcatatcgtgatcctcgccgagcatcgcctggcggatgcgcacgacgtggcgcgccgctttgaaaggatccggccgctgcgctacccgcgctggctggtggtattgatggtggggctgtcctgcgggtgcttcagcatgctcaacggcggtggcggcgacgccttcctggtgacctttatcgccagcggcacggcgatgttggtgcgccaaatcctcaccgcccgccagatgaatccgctgatcaatttctgcctgacggcatttgtcgcgacgtcgatctccggactgctgctgcgcctgccggcgtttaaagacacctcgagcgtggcgatggccgccagcgtgctgctgctggtgccgggcttcccgctgatcaacgcggtggccgacatgttcaaggggcatgtgaataccgggctggcgcgctgggcgatggccagcctgctgacgctggcgacctgtatcggggtagtgatggcgatgtcgctgtgggatctgcgggggtggtcatgaatctgttgtgggccttgttgcaggagatgctattggcggcggtgccggcgctgggcttcgccatggtgtttaacgtgccgctgcgtgcgctgcgctattgcgcattgctcggggctatcgggcgcggttcgcgcatgctgatgatgcatgccggcatgaacatcgagtgggcctcgctgctggcggcgatcctgattggcatcatcggcatctactggtcgcgctggctgttggcgcacccgaaggtgttcaccgtggcggcggtgatcccgatgttccccggcatttccgcctataccgcgatgataactgtggtggagatctcgcatctgggctacagcgaggccttgatggagaccatgatcactaacttcctcaaggccagtttcatcgtcggtgccttgtcgatcggcctgtcgttaccgggcctgtggctgtaccgcaaacgccccggcgtgtgaaatttcccggcggaagaacgttggttattagatatgctgataagagctatcttatatattcatcttgcttgattagcctatcgacggcactcaggcctttacgtatagtgtcaccaattttgctgcctacacagggttaaacaatgattatcagcctgatcgctgccttggcggcggatcgcgttattggcatggaaaacgccatgccgtggcacctgccggcggaccttgcgtggtttaaacgcaacacgttgaataagccggttattatgggccgcaagaccttcgagtccatcggccgcccgctgccgggccgccacaatatcgttttgagcagccgcccgggcagcgaagccggggtgacctgggtaacctcgctggatgaggcgctggccgccgcgggcgaggtggaagaagtgatggtgatcggcggtgggcgcatctatacccagttgctgccgcgcgccgaccgtctgtacctgacgcacatcgacgccgaagtcggcggcgatacccacttcccggattacgagccggacgagtgggaaaccacgttcagcgagttccacgacgccgacaatctgaactcgcacagctactgtttcgaaatcctgcagcgccgctgatctcagcgcgttagccagttatccccgggggcgcaagcaattgcgcccccggtctttttacgccggtcattcgtaacctttccgtcacattacctgattagtatgaagcccaactccgagcgccacggcaactctggtgaatcttgaccgcggcgccataactaaaaaggtaaccacgttatgaccaagcaaattgagcaattagacgccgaccgcctgatcgatcccactcgccgcaagctgttgctcggcagcgccggcgccgtcggcctggccggctttctcggcggtggcatctggtcggtctccgccgaggcgttggccgaggatctgccaccgaacaggctgctgggctttcagggcatcgccgcatctatcgccgacgaggtgaccatcgcgccgggctaccgcgcggaggtgctgatctcctggggcgagccgctggtggacggcgcgccggccttcgatccgcagggcaacaacagcgccgccgatcaggaaaaacagtttggcgacaacaatgacggcatgagcttcttccctattgatgacaatcacggcgtgatggccatcaataacgaatacgtcaacgaacagtatctgttcgcccacggcggcgccaaagccaccagcctggaagaggtgcgcaaatcgcaggcggcgcacggcgtctccattgtggcggtcaagcgggttggcgacggccagcgctgggaggtggagcgcccgtcgcgctataaccgccgcatcaccgccaacagcgaaatgcagttcagcggcccggccgccgggcactcgctgctgcagaccgccgccgatccgagtggccgcaaggtgttgggcaccttcggcaactgcgccaacggcaagacgccgtggggcacctatctgacctgcgaggaaaacttcgatacctatttcggcacccgtcaggccgattatcgcaccacgccggaacagaagcgctacacgctgaaggccagcgaaccggagcgcaactggccggactatgatgagcgcttcgatgtggcgaagaaccctaacgaattcaaccgccacggctggattgtcgagatcgatccgttgaatccgacctcgacgcccatcaagcacactgcgctcggccgtttcaaacatgaaaacgcggcggtgaccgtggccaaagacggccgtctggtggtgtatatgggcgacgacgagcgcggcgaacatatctataagtacgtctccaaaggcgtggtcgacgccgccaatccggccaacaatcgcacgctgttggacgaggggacgctatacgtggcgcagttcgacggcgatgaagccggcacaccgctgaagggcaaagggcgctggattgcgcttgagttcggcaagaacggcctgacgccggagaacggtttccgcgatgaggccgaagtgctgatcttcgcccgcaaggcggcgcagcaggtcggcgccaccaaaatggatcgcccggagtggatcgcggtgaacccgcatgacggccgcgcgtactgcacgctgaccaacaacagcaagcgcggcgaggaagggatgccgctgaacgccgccaacccgcggcctaacaatatctatggccaaatcattcgctgggacgagggcggcgacgctaccgccgacgtcttcgcctgggacatctatgcgctgtgcggcaacccgatcgcccaccccgaaggcgtcaaccgcggcacgccgaacatcacggcggaaaataccttcaacagcccggacgggctgggcttcgatcgcgccggccgcctgtggatcctcaccgacggcaagtacagcaacaagggcgattatgtcgggcagggcaacaaccagatgctggtgggcgatccggtcagcggtgagatccgccgtttcatggtggggccgaagtcctgcgaactgaccggcatcactttcaccccggactacaagacgatgttcgtcaacgtgcagcatccgggagaagagggcgattcgcacttcccgaacaacagcccgcgcccgcgctcatcggtattgatgatcacgcgtgaaaatggcggggtgattggggcgtaaggcgataatatagaaaacaaaggcggccacggggccgcctttgtattttcaggatgcggctaatctgccggcgtggtcagacgcctcgccgcgattggcgggctgcgtgaagtaacggcggtcttcccagcgcagcatcgtcaagtcgccgccccagcaacagccggtatccagcccgatcacgccttccggcgtgcccttgccttcgagcgaggcccagtggccgaagatgatggtgtattccgggtccaccaggcgcggcagttcgaaccacggcttcagcggcgccggcgcgctgcccggcgcatctttgcagatcatgtcgagctggccgttggggaagcagtagcgcatgcgcgtgaacgcattggtgctgaaacgcaggcgcgccaggccgctcagctccggcgcccagttgttcggcatgtcaccgtacatggcgtcgaggaacagcggatagctgtcgctgctcaataccgcttccacttcgcgcgcgcacattttcgcggtgtcgatatcccactgcggggtgatgccagcgtgcgccatcaccagcttttgctcatcatccacctgcagcaccggttggcggcgcagccagttgatcaactcgtcggcgtcaggcgcctccagcagcggggtgatgcgatctttgggtttgttgcggctaatgccggcgtaaaccgccagcaggtgcagatcgtggttgcccagcaccatgcgcaccgccggaccgagcgaacgcacgtagcgcagcacgtccagcgaggcggggccgcgcgccaccagatcgccggtcagccacagttgatcgcgctcgggatcgaacgcaacctgagccagcagcgacttcagttcatcaaaacagccgtgaacgtcgccgataaggtatgtcgacataattaatggatcagcgttggaatggctaagcgaaacacgggaatagcggtgcggaacggctgaccctgatggtcaaccatttcgtaatggccttccatggtgcccagcggcgtttccagaatggcgccgctggtgtactgaaactctccgccgggcggaatgacgggctgttcgccgatcacgccttcgccctggacttcggtttggcggccgttgctgttggtgatcagccagtaacggcccagcagttgcacgttggtccgccccagattgcggatggtgatggtataggcgaagacgtaacgctcttcttcagggatcgactgtgattccacatagatgctctgaacctgaatacacacgcggggcgaatcaatcatgacaacaactccttattgctgcggcgccggattggctgacagccagttcgccagcttgcagtactgcgccacagaaatattttctgctctgagcgaaggatcgacgcccagctccgtcagctgctccggcgtgaacaggtcgcccaggctgttgcggatggttttccgccgctggttgaacgcctgcgtggtgatgcggctcagcatgcgcacgtcgcccaccgggttcggcagctcggtgtgcgggaccaggcgcaccacggcggaatcgactttcggcggcggcgcgaacgcggtcggcggcacttccagcaccggaatgacgttgcagtagtactgcgccatcacggtcaaacgcccgtaggccttgctgttcgggccggccaccagacggttgaccacctctttttgcaacataaagtgcatgtcgcggattgcctgagtatagctgaaaaggtggaacatcagcggcgtcgaaatattgtacggcaggttaccaaatacgcgcagcggttggccagcttcctcggccagttcggcgaaattcaccgtcatggcatcctgctggcggatggtcagcttgtctttcagccgcggatggttctccaaccgggtggccagatcgcggtccagttcgatcaccgtcatgcggtccatgcgcgcgccaaccggctcggtcaaggcgccgaggccggggccgatctcgaccaccgcttcgcccggctgcgggtgaatggcggagacaatgctatcgatgacaaactgatcggttaaaaagttttgtccaaagcgtttgcgggcaaagtgcccttggtggactctgttattcattacaattaattatcattttaatggcgagattcagggccgtttggaaactgccgacatcggcggtgccggtgccggccagttccagagcggtaccgtggtcgaccgaggtgcgtatgaaaggcaaaccgagggtgatattcaccgcgcggccgaacccttggtattttagcaccggcagcccctgatcgtgatacatcgccagcaccgcatcggcatcttgcagatatttgggctggaacagggtgtccgccggcagcgggccgatcagatggataccgtcagcgcgcagcgcgtcgagcgccgggatgatggtgtctatctcttcgcgccccatatggccgccttccccggcgtggggattcagaccgcagacgtaaatgtgcggctgagcgatgccaaatttggttttcagatcgtggtcgagaatgcgaatgacttcgaacaggctctgctgcgtgatggcgcccggcaccgccagcagcggcaggtgggtggtcgccagcgccacgcgcagctcttcggtcgcgagcatcatcaccacgcgatcgcagcggctgcgatcggcaaagaattcggtatggccgataaacggcacgccggcgtcgttgatcacgcctttgttcaccggaccggtgatcagagcggcaaattcgccgttcaggcagccgtcgcaggcgcgcgccagggtttccaccacgtaggcgctgttgccgacgttcagttcaccggcggtgaccggctgagcgagcgacaccggcagcacggtcagcgtgccggcgcgttgcgcctcggccggttgctgcggttggtagtcgcgcagcgtcagcggcaggcccaaacgcttggcgcgttcaagcaacagggccggatcggcgcacaccaccagctcaacaggccaatcctgttgcgccagggcggctaccaaatccggccccaccccggcgggttcgccgggggtaatgacgacgcgtttattgctgcgcatcgctgccatcgaggatcttcacgtaagcctgggcgcgctgttcctgcatccaggtctgcgcctcttcggcgaacttacggttgaacagcatgcggtaagcgcgatctttctgcgcggcgtcggttttatccacctgacgggtatccagcagctgaatcaggtgccaaccgaaggaagagtgcaccggtgcgctgatttcacctttgctcagcttcagcaacgcatcgcggaaggccggatcgtagatgtccggggaggcccagcccagatcgccgccctgcatggcggaacccggatcctgcgacagctgtttggcttcgtcggcgaatttggcgcggccgctcttgatggcttccgcaacggattgcagcttggcgcgcgcctgatcgtcagtcagcaccaccgaaggcttcagcaggatgtgacgggcgtgcacttcggtgaccgacaccgactggctggcgccgcggatatcgttcactttcaggatgtggaagccgacgccggaacggattgggccgacgacgtcgcctttcttggcgctcaccagacgttcagcgaacagggtcgggatctcttgcagcttgccccagcccatgttgccgcctttcagcgcctgagagtcggcggagtaagtgatcgccagcttgccgaagtcggcgccgctgttgatctcacccaccaggcgtttggccagctcttcggctttgtcgacctgctgctgcgacgggttttccggcagcgggatcaggatgtggctgatgttcatttcggtgtcgctgccgttctgcgcgcccacctgtttggccagcgcgtccacttcctgcggcaggatggtgacgcggcggcgcacttcgttgttacgcacttcggaaatcagcatctctttacggatctgcgaacggtaggtgttgtagttcaacccttcgtacgacaggcggctgcgcagctgatcgacgttcatgcggttctgcgcggcgatgttggcgatcgctttgtccagctcggcgtcggagacggtgatgcccattttcttggccatctgtagctggatgttatccatgatcagacgttcgatgatctgatggcgcagcgtcttgtcgtccggcagttgctgaccggcctgctgggcgttgagcttcaccgactgcaacagtccgttgacgtcgctttcgagtaccacgccgttatccacgacggcggcgactttatccacttcttggggtgctgcgaacgcggcattggcgcaaaccaccaatccgagaataagcgttctccagttcttcatacatttcccattatgtaatccgcaaatgcgggtgaaagttctcgttttcaaagtgttgcaaagcgtcagaatgcgcgctgatacggcaggatgccggagcgcagcatttctgcggagccgagactatgatcgctgctcaggccgcgcagttcgacgttgaacgaaactctgttgtcgtaaacgctggtattgttgctgttgttccagtcggtgatcttgcgctcatagcccagcgtcaccgcccagcagcaggtgttgtacttcagccccaccagctgatcggcggattgtttggcacgggtgtcgtagtagtacgccccgaccactgcccaacgatcggcgatcggccagctgccggtgatgcccacctgcgagatgccgtcctggaaggccggaaccgttttggtgttcaacgccgtctggatatattccggcgtggcgtaacggtagttcagctgcactacgcgctcggcatcctggcggtattccaccacgccgttgcccagcgagacgctgttcaggcgggtgtcgtactgcaggccgccgcgcaggccccaacgatcgtcgattttccaataggtatcgccggcccaggccacgctaccggtatcgtcgttgttgtcgtacccggttacccgatcgccggtgcgcgaacggctgaagtagtagatttgacccacggaagcgttaaaacgttcaaccagcgcgtcatcataaatgcgggtggtcaaaccggtagacacgcggttctgcgaagcgatgcgatccaggccgctgtaggtgcgatcgcggaacaggccggagtagtcggtctgcagcagcgtggtgtcgtaggtgtagatgttgctctggtcacggtacggcacgtacaggtactgcacgcgcggctccagcgtctgggtggcgccttcggcccagatcatcggccgctcgaacaccagcttgccgtcgaccttgaactgcggcagtacgcggttgaccgaatcatcgagctccggcgcggcagcgtttttgcggctctggtagttggcggcgaaaccgtcaggaatatcctgctggtaatgggtcgccatcaccttggcttcggtgttcaggctggcccagccgttggtgagcggcaggctcagcgtcggctccatatgcagacgggtggcgtccgggctgtatgggttgacgctggtgaacttggccgcctggccgtagatatggaaatcgaacggaccgaggtcgttcttgtagtagttcagatccaactgcggctggactttatacgagtctgattgtgagcgatcggtatcgtcgtaaatctggaactgcttggagctcagcgtggcgttccagttctcgttggcgtagccgaggctgaatttctgcgtggcgtagccgtcggtggtggagccgtatttggagtccagatcggtgaagtacttggaatcgctgaccttggtgtaatcgacgttgaagcgccacacctgatccataacgccgttgtggttccagtagaacagccagcgtttgttgtcgtcatgatctttgccgtattccttgtcgtccggcaaccagtcgaactccatcaggccgaggcccggctgcaccagataacggaactcggtctgccactgcaggccgcgcttggacatatagtgtggcgtgatggtggcgtcgtagttcggcgcgatgttccagtagtacggcaacatgaactcgaagccgttgttgctgccgtacttggcgttcgggatcaggaagccggaacggcgcttgtcgccgaccggcagctgcaggtacgggctgtagaacaccggcacgccgccgatgcggaagcgggcgttccatatttccgccacctgctcttcgcgatcgtggatcacttcggaaccgaccacgctccagctgtcgtcgcccggcagacaggaggtaaaggtgccgttttccaggatggtgtaacggttggcgccgcgcattttcatcttgtcggcgtcgccgcgcccctgacggccgaccatctggtagtcgccttcatagacgtcggtatctttggtattcaggttagaccaggccttcgggcctttcagtttgatctgattgtcgctgtagtgcacgtcgccggtggcggtgacggtacgcaccggttccgtctggccggggttttgcgtctgattcagctcaacttctttggcggtcagggtgctgttgccctgctcgatatgcacgttgccgctgaacagggcgcttttcgggtagtcggcgcgcgagtcatcggcattgatggtcaccggctggctgttcggatcgccgctgaccaaaggcttgtcgtaaacaggaacgccaagcatgcattgctcggccagatcagccagcgcatgctgactgtagagtgccgtccaaatcatcgtggccagcagtgttgggaaactttttttcatacgcggttttggtgttccgtcatcagaggcgtcgtgtccggcaaacggtcagagactatattactcatctgcgttgcgctagtgctaaatccagccgtttacttgcgtcgtcgttaggcgcaaagataaatgacaggtatgataatccaaattctaggaaaaatcgcctgcgccctttcctgaagcgaaggagagcgggcggctttcggcatgataattgaggagtatatgcagtattggggaaaactgctcggcgtcatcgtcgccatctggtctggcgcgggattctggggtgtagttctggggctgattatcggtcatatgatcgatacggcgcgcagcaacaagcgcagccgggggtttttcaccgaccagcaaacgcggcaaacgctgtttttccgcaccacttttcaggtgatgggccacctgaccaaatccaaagggcgcgtcaccgaggcggatatccagatcgccagcctgtttatggatcgcctgcagctgcacggcgaagcgcgcaccgcggcgcagcaggcgttccgcgagggcaaacagagccagttcccgctgcgtgagacgctgcagcagtttcgcagcatctgtttcggccgcttcgatctgattcggatgtttctggaaattcagattcaggcggcgttcgccgacggctcgctgcacccgaacgaacgtcaggtactgtatgtcatcgccgaagagctgggcatttcgcgcgcgcagttcgatcagttcctcagcatgatggagggcgggcgtcagttcggcggcggtcagcagggcgggtattcgcagggcggctatcagcaggctcagcgcggcccgacgctcgacgatgcgtgcaaggtgctcggcgtgcgcagcagcgacgatgccgccaccatcaaacgcgcctaccgcaagctgatgagcgaacaccatccggataagctggtggcgaaaggcttgccgccgcagatgatggaaatggccaagcagaaagcgcaggagatccaggcggcgtacgacctgatcaaacgcgagaaaggttttaaataacgatacccgtcatacttcgagctgcaggtgtgttggctgcccgcgcttaccccggtcgcgtactttttgtacgctcccggggctgcgcttagttgccgccttcctgcaactcgaattatttagggtatctcagggtgatgagctcagaaatccggctcggcgcgaaagtgcatcggcgtctggaaggcggggtgggtgatgcgcagctcttgcgcatgcagctgtagccgtggcgccatcgccttagcctccggcggggcgtagaaaccgtcgccgaggatcgggtgccccagcgccagcatgtgcacccgcagctgatgcgagcggccggtgatcggcgtcagcttcacgcgcgtgctgccatcggcgtctcgcgacagcaccagatactcggtttgcgccgctttgccggtgtcaaaacacaccttttgcagcggccggttcggccaatcgcagatcagcggcaaatccaccagtccttcgtcatgttccatatgctcccaaacgcgggcgatataggatttcttcggctcgcgttcgcggaactgacgcttcagctcacgctcggcggccttgttgagcgccaccacgatcaccccgctggtggccatgtccagccggtgcaccgattcggcggccggatgatcggcctgaatgcgggtcatcaggctgtctttgttttccggcgcgcggccgggcaccgacagcaagccgctgggcttgttgaccaccatgatgtgttcatcctgatacaggatgtgcagcgggtcctgcgggggattgtagggttccatcttggctccgcgaaaagggccgaccggggagacggtggcctccccatgtcgcgccggttactggtgggtgaccaccaccagacgaatggcgtccaggcgccagccggcttcattgaggttggccagcacctgacggcggttgaactccagcgcttcgacttcgtcgtcgcggatgttcgggttgaccgccttcagcgcttccagacgcgccagctcggcgctcagcttgtcgtccgcctcttgcttcgcttgttcgataagcgtgcgcgcctgcgcttccaccaggctttccgcctgctgcagcatggcgtgcacgtcttgctgcacggcattgaccagcttgctggaagtgtggcggttgaccgcgttcaactggcggttgaagctttcgaactcgacctgcgccgccaggttggtgcccttgcggtccatcagcatgcggatcggcgtcggcggcaggaagcgggtcagctgcaggtgcttcggcgcctgggcttccaccacgtacaccagctcaaccagcaaggtgccgaccggcaacgctttgtttttcaacagggacaccgcacagctgccggtatcgccggacaggataagatccagaccgttgcggatgatcgggtgttcccagctgacgaactgcgcgtcttcgcgcgacagcgcccgatcgcgatcgaaggtgacggtgcagccgtcctgcggcaggcccgggaagtccggcaccagcatatggtcggacggcgtgagcacgatcaggttgtcgctgcgatcttcctgattgatgccgacgatgtcgaacaggttgagcgcgaagcccaccaggttgacgtcgttatcttgctcggcgatggcggcggccagcgcctgggctttgtcgccgccgttggagtgcatctccagcaggcgatcgcggccctgttccagctgcgctttcaactggtcatgctgctggcggcaggcatggatgaattcgtccaggccttcctgctcggtcggcgcggccagatagccgatcaactgctcgtagcagctgtcgtagatggtgcggccggtcgggcaggtgtgttcgaaggcgtcgagcccttcgtggaaccagcggcccagcaccgcctgcgcggtgtgctccaggtaaggcaccatgatttggatatcgtgcatctggccgatacggtccagacggccgatacgctgctccagcagatccgggttgaacggcagatcgaacatcaccagctggctggcgaactggaagttgcggccttcggaaccgatctcggaacacagcagcacctgcgcgccttcttcttcggaggcgaagtaggcggcggcgcggtcgcgctcgatgatcgacagcccttcgtggaacaccgcggcgcggatcgcttcacgctcgcgcagcacctgctccagctgcagcgcggtgtcggctttggcgcagatcaccagcactttttcgttgcggttggccagcaggtaatccagcagccactcgacgcgcggatcgaagttccaccaggtggcgttttcgccttcgaattcctgatagatctgctccgggtacagcatgtcgcgcgcacgggcttcgacggactttttggcgcccatgatgccggacactttgatcgcggtctgatattgggttggcaatggcagcttgatctggtgcaggttgcggtgcgggaagcccttcacgccgttacgggtgttgcggaacagcacgcggctggtgccgtggcgatccatcagcatcgataccagctcctgacgcgcctgctcggcgttgtcgccttcgctgttggcggctttgagcagcggctcgatgtcctgctcgtcgatcagctcgcccagcaggttaagcttgtcgtcggccaggcgttcaccgctcagcagcagggtgacggcgtcggccaccggacggtatttctgctgctcggcgacgaactcgccgtagtcgtggaaacggttcgggtcgagcaggcgcaggcgcgcaaagtggctctgttgaccgagctgttccggggtggcggtcagcagcagcacgccggggatatgctcggccagctgttcgatcacctgatattcgcggcttggcgcctcttcgctccaggccaggtggtgcgcttcatcgaccaccagcagatcccactgggcgtccgccagctcttccaggcgctgcttgttgcggcgcacgaagtccagcgagcagatcaccaactgttcggtctcaaacgggttgctgctgtcgagtttggcttcggcgtagcggctgtcgtcgaacagcgagaagtagaggttgaagcggcgcatcatctccaccagccactggtgctgcagcgtttccggcaccacgatcagcacgcgttcggcgcgccccgccagcagctgctggtggatgatcatgccggcttcgatggttttgccgaggccgacttcgtccgccagcagaacgcgcggcgcatggcgctggccgacttcatgagcgatgtgcagctggtgcgggatcaggctggcgcgcatgccgcgcaggccggcgaacggcaggcgatactgctcgctctggtatttgcgggcgcgaaaacgcagcgcgaaacggtccatgcggtcgatttggccggcgaacaggcgatcctgcggtttgctgaaggtcagcttactgtccagcagcacttcgcgcatcgccacgccgctttcctgggtgtccaggcgggtgccgatataggtcaacagaccgttttcctctttcacctcttccacctgcagctgccacccctcgtggctgctgacggtatcgcccgggttgaacatcacgcgggtgatcggcgaatcgtttctggcatagaggcggttttcaccggtggcggggaaaagcagggtaatcatgcgcgcatccagcgccacgacggtgcccagtcctaattcgctttccgtgtcgctgatccagcgttgaccaagagtaaaaggcatatattgtcggctcgattctttgtaagtaagtcttgttaccgggcgggaagggccgcggcacctgtactgaacgtctgctaatcccggtttgttttaaatttggcgggcaatagccgttcacgccatgcagacgtcgcgagacggcagggctaagcgtggttcagttttgggaagggcgctatggtaatggaaggcggcgcgttcgtcacctgcaaaaccggatgatttttcttaacctggcgcaatctcaaaacagccccatctgcccggtgaccagcgtggtgaaatcgtcgtgcaagaaagggagtatagcgtctgccaccggttgcagctgccgttcaaggtagtgctgataatcgatgggcgaatggcgggtttccagcggttccggcccggccacggtcatcacgtagctgatccagccgccgttctgatactgcagcggccgcccctggctgcggttgtagtcgtcggcgatgcgcgcggcgcgggcgtgcggcggcacgttgcgctgatagtcatcgagctttctgcgcagccgtttgcggtacaccagttgatcgtcgaagtcgccgttcagggttttgccgacgtaatcgcgcacatagtcctggtagggctgttgtttgaagatacgctgatagagctgctgctggaactgctgcgccagcggcgtccagtcggtgcgcaccgtttccagccctttgtacaccatctcttcctcgccgtcggcgcgcgcgatcaggccggcgtagcgttttttgctgccctgttcggcgccgcgaatggtcggcatcaggaagcgggaatagtgggtttcgaactccagttccagcgcgttctccagcccgaactgctgcagatgctgttgccaccaggcgttgacccgctgcaccagcgcccggccgatctgcgccgcctgctgctcgtcatgcggctgtttcagccacacgaaggtggagtcggtgtcgccgtaaatcacctgatagccttcggcttcgatcagctcgcgggtttggcgcatgatctcgtggccgcgcagggtgatcgacgacgccagccgcggatcgaagaagcggcagccgctcgatcccagcacgccgtacagcgcgttcatgatgatcttcagcgcctgcgacagcggcttattgtgctggcgtttggcggcctcgcgcccctgccagatctgttcgacgatcgccggcaggcagtgtttactgcgcgagaagcgggcgttgcgaaagccgggcaccgagtcggcgtcgcttgggtggcgcatgccttccaccagcccgaccggatcgatcaggaaggtgcggatgatcgacgggtacaggcttttatagtccagcaccaacaccgaatcgtacaggccgggccgggaatccatcacaaagccgccggggctgtgttcctccggctgttcgccgaggttgggggcgacaaagcccaggcgatgcatgcgcggcatatagaggtggctgaaggccgccaccgatccgccgctgcggtcggccgccagcccggtgacggtggcgcgctccagcaggaagttgagcaggtcggccttggcgaagatgcgcgtcaccagctcacagtccttcaggttgtagcgagccagcgccggcttgtcttcggcgaagcgccggtcgatctccgccatgcgttgataaggattgtcgatcgccttgccttcgcccagcagttcctgcgaaacgtattccagactgaaggagggaaagttccaggtggcggatttcagcgcctcgatgccatcgatgatcaggcggccggcggcggcggcgaaaaagtgattctgcttgaagccgtgctcgcgccactccagcaggttgccgccgcgccccagccgcagcgggatttggtagcgctcggcgtgcttttgcagcacccgcagatcgaactgcaccaggttccagccgatgatggcgtcaggatcgtggcgctccagccaggcgttcaaccgttccagcagctgggggcggctggcgcagtattccagatcgaaatccagcggctcatcgccgccgttggccggtcccagcatgtagacctgccgctggccgcagccttccagcgcgatggagtaaagctcgccgtgggcggtggtttcgatatccagcgacaccagttttagcgttgggcggtactccggcgccggcttcatttggccgctgagcaacggcccattgccgtcgccctggccgttgaaccacaccggcgcggtgatgaagcgttccatcaggtagcgctccggtgggcgaatgtcggcctcgtagaccgcaacgccgccttcccgcagcagtttttccagcttgatgagctgacggtgctggcggcagtacagccccagcatcgggcgatggtgaaaatccgtcagcgccagcggtttcagttcgacttgccgctcttcccgcagcagcagttccgcgcgctgcctttgttcggcggggataaacgccaccgaggtttgcggcggcaggcgtagctgacgcgggccggcgtcggtcgccagccagaattcgacctcggtgccggcgggcgtgtcgcgccagtggcgagtgagcaggaaaccctgttgcagtgctgtcataaccccttcgtcttccgccgggcggcgggcgcgacattcagcgagatgtcggttttggcgctaatatagataaattatagtatgggtttttatacagtgattgtccatcgccgcgcggcgttgccaaatacgcatacaattgatcgattgactcgtctgcggcggcactggaaaatcctccgcccgtttggcccgaataatccacagaggtgtaatggaagcctatttacaagatttgatcacccagtcactggctttcaccctgatggtcgttctgctggtcgcttttctggagtcgctggcgctggtggggctgctgttgcccggcacggtgatgatggccagcatcggcgcgttgatcggcagcggcaaggtggacttttactacgcctgggcggcgggcatcgtcggttgcctgctcggtgactggatctcctatttcgtcggccgcgcgttcaaggggccattacaccgttggtctttcctgaagaaaaacaaggcgctgctagacaaaaccgagcacgccttgcaccagcacagcatggcgaccattctgatcggccgtttcgtcggcccgacgcgcccgttggtgccgatggtggctggcatgctcgatctgccgccgtacaagttcgcgctgccgaacatcatcggttgcctgacctggccgccggtctatttcttccccggcattctggcgggcgtggcgatcgatattcccgccggcgccgacagcgcgatgttcaagtggctgctgcttgcggcggcgctgctggtctggctggcggtatggttgagctggcgctggtggcgcgagggcaagcgcagcgccgatcggctgagccgttggctgacaccgctgcggctgcgcgtggtgtgcggattgagttggctggcggcactggcggccggttatgcgctgagccagcagcctctgatgccggtgtatcgccacctgctgtggcaggtgttgtccgggcaatgacaaaagggggcgaaagcccccgttcgccttactggaagaacgcttccagctgttcaaatacccgcacgtcttcgctgtggcgcttcacctgcagcacatcctccagcttttccacctggcttatcatctgctccagccgctgatcgtcggcgaccaatagccaaatgcggctctgttggccgtcgttcaatggcaggcacaaaatgccttcgacgttgaacgcgcggcgggcgaacagcccgcaaacgtgcgacatcacgccgggatggttacgcaccgccagctccaggatcacctggggtttatcttgtggttgcagcatggcttattctccaatcatgtcgatgttggcggcgcccggcggcaccatcgggaatactttttcgttgatatcgatcagcgcgtggatcaggcaggggcccgggcgttggatcgcctcggccagcgccgcctgcggatcttccgcggcgttcagatcgcaggtatccaacccgaatccggcggcgatcttcaggaagtcggtgcgcttcggataggcggcggcgaagatgcgctgttggtagaacagggtttgctgctggtgcaccagccccagcgcctggttgttcatcaaaatgattttcacgtccagatcgtgctcgaccgcggtggccatttcctgaatgttcatcatcaggctgccgtcgccggagaagcacagcactttgcgcttgggctccgccagcgccgcgccgatcgccgccggcagaccgaagcccatggtgcccaggccgcccgacgtcagccactggcgaggccggctcagcggataggcttgcgccacccacatctgatgttggcctacgtcggtggtgataatagcgctgtcgtccacgcagcgcgcggcggccagcaccaggccgtaatggctcagcggatcgtcggcgttgggcatgttgaacgggaattcgcgcttcaggtcgttgacggtgttcagccattcgctgcgcggctgcgtgtcgatctgcggcagcagctggtgcagcacctggccgacgtcggcatggatcgccacgttggcctgtttgaccttgcccagctcggcgcggtcgatatccacatgaatgatggcggcgttagggcagaactgctcggttttgccgattgcccgatcgtcgaaacgcgcgcccagcacgatcagcagatcggcttcctgcagaatgaagttggtgctgcgcgccgcgtgcatgcccagcatgcccagcgacagcgggtgttccaccggcatcgcgcccagcgccatcagcgtcatggtggtgggcagaccggcgcgttcggccagttccaccgcttgccggtgggcgtcggcgcagatgatgccgccgcccagatagaggatcgggcgctttgcccggttgatcatcgcggcggcctgcgaaaccagcgccggatcgaagctcggagcggcgtccggcacggcgatcggcggcagctcttccagcgtgatggtggcggtttgcacatctttcggcacatcgatccagaccgggccggggcggccggactcggcgatgcggaaggcgtcgccaatcacctgcggcagttcgcggatatcgcgcaccagatggttgtgcttggtgatcgggatggaaatgccgtaggtgtccacttcctggaaggcgtcggtgccgatcattgaggagggcacctgaccggtgatgcacaccagcggaatggagtcgagtttggcgtcggcgatagcggtgaccaggttggtggcgcccggcccgctggaggcgatgcacaccgccgccttgccgttggcgcgcgccatgccttgcgccataaagcccgcgccctgttcgtggcgcgccagcacgtggtgaatgcgggtgctttggctcagcgcgtcatacagcggcagcgcggcgccgccgggaatgccggcgacggtggtgatgccctgacgctccagcagatgaacgatcaattgtgcgccggtgaagctggtgcccggttgaggcgtgcccgaagttgccatgttcctgtcctttctcaaggccggtgagctttgctgggcagggtgctaaaacaagaaaccccgcccggtttgcgccggcggggtttgggaatcgatgcgttgattcggaccctacggcgcattgccgacgaccaccaccacacgcacgacgaccaccgcggctggtagcgcggtaactagtagggtcgaagtcagcgaggatgcgatcacagggaaccttatcatcagtaaaaaaagtcaggtttttataaaaacacaggcgcaaaattcgcacaacaggtttattggcgcagcataaaaaacgcgcgtcagatcacgctttgcccgaaatgcccagcacgcgcgcttcgggcgcgctgccgtccagcagggcctgcgtcgggccgtcgtagtagatgcggccgtcgaccaccagcagcgtgcgcggcgcgatgcgcgcggcgtcgtcgaggttgtgcgataccatcagcagcgtcaggttgcgctgttcgcataccgtctgcagcagttgcaacatctcgttgcgcagcgccggatcgagcgccgagaagggctcgtcgagcagcaggatcggccgttggcgaatcaaacagcgcgccagcgcggcgcgctgacgctggccgccggaaagttgcgacggcaggcgctccagatgctcttccaggccgacctgacgggcgatgtgcgcccgctgttggcgctgctgttcagtcaagcgcagtccgggatccaaccccagcccgatgttctgcgccaccgtcagatgcgcgaacaggttgttctcctgaaacagcatcgacaccggccgcttggccggcggcgaggcggtgtggtcttcgccattcagcagcagccggccgttggccgccggcagaaagccggcgatcaggctcagcaaggtgcttttaccggcgccgctggggccgagcaccgcgacgcgctcgcccggctggatgcgcagatcaaagcgcatcggcaggtgttcatacaggtaggtcagtttttcaagcgtcagcatggcggcccggtaagcgttcaatcagggtaaacaacaggaagcacagcagcagcaacagcagcgcggtcaccgccccgtcgttgctgcggtaggcgccaatctgctgatacaggtaaaaaggcagggtacggaaatgctcgttgccaaacaaggcgaccacgccgaagtcgccgatcgacagcacgcaggcgaaggccagcgcctgtgccagcgggcggcgcagggcgcgcagctcaatcagccgcagccgtcgccagccgcggatatccagcgacaggcacagcggattgtaacgttcggcgaggtcgcgcatcgggttctccaatacctttagcgcatagggcaccgccatcagcgcattggtgaggatcaccagcgcatagggcgactgcggcaaccccacggtatcgctcagcagcaggaagaagccggtggccagcacgatgcccggcatcgccaggatcaccatgccgctgagctccagcgcctggccgccgcgcagctgttgccgcagttttagctcacggctgctccacagcagcatcatcgtgagcgccacgcacagcagccctgcgccgagggcgatgcgcagcgacgtgaacagcgcctgccacagcaccggctggcgcagcacgctgaccatggcctgattggcgccgtcggcgatcaccgccagcagaggcggcagcagcagcaacagtgcggcggcgatcagcagaaaatcgccgacgcgtcgccacaggctgtcatccggattgcgccagcgctgggcgtgggtatgccccaccggcaatgcctggctcaggcgctgactgatcaacaccagcccgagacaacagcccagctggatcagcgccagcatggcggcacgccccagatcgtagtcgtaactcagcgcctggtagatcgcctgttcaatggtggtggcctgcggcccgccgcccagcgacagtacggtggcgaagctggcgaagcacagcatgaagatcagcgcgccgctcggcaggatttggcggcgcagcgccggccattcgacgaagcggaactgctgccagccgttcatgcccagttgggcggccagctggcgctgctctaccggaatgttctccagcgcctgcagcaacaggcgggtggccagcggtagattaaagaacaggtgcgccagcagaatgccctgcagaccgtagggcgagaaaccatactcgacgcccagccagccgcacagcgtcgccagccagccctggcgcccatagacgctgagcaggccgaataccgctaccagcaccggcagcaccagcgtcatggcgcacagccgcagcaacaactgccggccggggaaacggcggcgatagagcgcgcgcgccagcagaatggcgggcagcaccgaaatcagcgccgacagcagcgcctgcaggaaggtgaagcgcaccacgtgccacaggtaactgtcctgccacaggctgcgccagtcgctgtccggcgcgtgacgccacagtgaccccagcgccagcgcggcgatgagcaggatcaggccggcggccagcagccccggccagagccagcgggggatcagcggctgacggcggtttgccatgcccggatccaaccgccgcgttgtgtggccacctcttcggcgctgtattgcagcgcggtctgcggcacattcatctgctcaaagccgacgggcagcggggtgttgatcaccgggtacatccagttgccggtcgggatggtgttctggaatgccggcgtcaccatgaaccgcatgaaacgctcggccagctcaggctgtttggcggctttcagcttgcccgccacttccacctgcaggtagtggccttcgctgaacgtggcggcggcgtaaaggtcttttttctcttcgatcaggtggtaggcgggagaggtggtatagctgagcaccagatcgccttcgcctttcaggaacaggccgtaggcttcgctccagcctttggtgacggtgacggtcttcttcgccaactgctgccaggcggccggcgccttgtcgccatacactttttgcatccacagcagcaggccgagccccggcgtgctggtgcgcggatcttcgtagatcactttccagttgcggtcgccgctgaccagctcctgcaggcttttcggcgggttcttcagtttttctttgttgtagacgaaggcgaagtacccgtagtcgtaaggcacgaaggtcgcgtcctgccagccgcccggtaccgtcagcctggcggtatcgacgccgctcggcgcgaacaggccggtttgctgcgccgcctgcagcaggttgttgtccagccccagcaccacgtcggcggcgctgttcttgccctccatgcgcaggcggttcagcaacgagacgccgtcttccagcgccacgaacttcagttcacagtcgcattcggcctcgaaggcttttttcaccgccgggccagggccccagtcggcggcgaaggaatcgtaggtgtaaaccgtcagcgtcggcttggcgaacgccggcgcggcgcacagcagcaataagcagggcagatattttttgaccacgttgcactcctgaaaaataaggggcaagggcatctgagggggcgaggcggcgtcgccggttcgctgggctcaaatccctccgccggtattgaccggatcaggttcgacgggtgtgctctcagcggaaaatcaggcttattacgcggcccggttctccgcaccccgttgaaacggcgctattgtaaagattaaccgacttgggcgaaaggcgcttatgtctccggcggggcaaaccaggcggacttgaagtcgaaccagccgagggtgttcatccgcacgccgcgcatgctgcgctggccgtgcagctgcagccagtggtggaacagcggatgcagctggtggttgctgaccagacgctggcagaactccgccagcggcagacggttggcgcgccacagcgccgcgtcctgcgccagatcttcgttcatgcaatgctgcatcagcggcagttcgtacagcgtggcgaacagcgaaaactccagcggcagatagaagttggcgctgccaagccacagatcgctgcgcgcgtcgccctggtgccaggtggcgtaatccacgctttgcacgatcaggcggatgccgtgctgcgccagcagcggctcgatcgcctgacggatggcgtgaaactccgaatgctcattgaagtgggtcatcgtcagttcggtcagccccgccggtttgggctgctgcgccagcgcgcggttgtggtgccaacggggcagcaggccgtacgccggcgaccagtagcgttggtagagcggcccggcgtggctcagcagcgaaatgggattgatcaattcgcacagccagctgcgaatggcgggatcggcggccagcggggagcgccggtcgaacagcaggaaatagcagccctcttccagccggctttccagttcgttgttgccggtttcatcgccctgcagctgtacgccggaatgcaccagttcttcggagaactccggcagcacccagatattcacctcgtcgatcagcgcccggtagccaaaatagtcgtcgaaggcgtggatcttcatctggctggggagattgcgcactacgcgataggggccggtgccgatcggatggcgggcgaaatccggcagttcgcgccattcgcgcggcaggatcatggcgtgcacgctgcccagcagccagggcagccagtggtcggggctgcgcagatgcacgtcaatcacgaatggcgtcggcgaggtgacgctctctatatgcgagaacagcggttgcgaggtcagacgcgaaagagaagtaatgacgtccgccatctccagctcgcggccgtgatgaaaatggatcgccgggcgcaggtaaaatcgccagtgcagtggcgtcaacgcctgccaatggtgagacagatcggactccagttccccgttttcctcatttatgcgcgtcagaccgttgaagatctggcgcgccagatgggtttccgaacgccgcagcgccgagccgggcagcaggttgtacaactgccggtagtagagcacccgcaggatgtgtttcccctggcggaagctacgccccagctgcgacagcagcatctggcgcaccacatttttgtcgcccaccagttgcaccagctgatcgatgcgatcctgttccagcagctcctcggcccgctgttgctgcagcgccaggccggtgtagtggaaggttagccgcgaacgcttgccgcgccccgactccgcctgccaggtgagccagccttcccgctgcatggcgctcagcagggagcgcacgtggcgccgcgagcagctgagcacctccgccagatcctgcagcgtggtgtcggtggtttcaccgtggcagcgctgccacaggcggatgaactgctgctgcaatctggacgtggacataaaagaggaacgctcccgcttcaactcgtcaatttttctttccctatattacgccgataattttcatcaatgaaaggggagggcgtaatcatgaaagctttcttatccaggcagttctatcagcgctatttcagcgcggtgcgccgccagcgagccgactggctgagcgtggtgcccgaacaggcgcggctggcgatgctggcgcacctgacgcaatgggacattaaagagatgaccgataagcagtatcgcgagcacctgtaggggctgcggcaacaagtttctgagtaatggtgctgtttcaccagccagtggggtgacccactggtttttttatgcgcggtcatggcgatgcgcttgcatttttctcgccgtggcttaaggttctttcttctgctttgaggtcagggaagacgatatgcaacgcatgagccggttgtcactgagcattaaccccatctttgccgcattcctgctgatcgcttttctctccggcatcgccggcgcgttgctgacgccgacgctcagtctgtttctgaccaccgaggtcaaagtgcggccgctgtgggtagggctgttttacaccgccaacgccgtggccggcatcgtggtcagttttctgctggccaagcgctccgacacccgcggcgatcggcgccggttgatcctgctgtgctgcctgatggcggtcggcaactgcctgctgttcgcctttaaccgcgattacctgacgctgatcaccgccggggtgctgatgtccgccgttgccaacaccgccatgccgcagattttcgcgttggcgcgggaatatgccgacagcgaggcgcgtgaggtggtgatgttcagctcggtgatgcgcgcccagctttcgctggcgtgggtgatcggcccgccgctgtcgtttgcgctggcgctgaactatgggttcaccgtgatgttcctgatcgccgccgccaccttcgcggtttgcgtactgctggtagggtttatgctgccttcggtgccgcgtgcggcggagaataaggagctgcagggcgggatgtctgcgccgatcgcgcccgccagcgcctggcgcaatcgcgatgtgcggctgctgttcatcgcttcgatgctgatgtggacctgcaataccttgtatatcatcgatatgccgctgtatatcaccgccgatctcgggctgccggaagggctggccggggtgctgatgggcaccgccgccgggttggaaatcccggcaatgctgctggccggttattacgtcaaacgcttcggcaagcgcaacatgatgctgctggcggtggcggcgggcgtgctgttttatctcgggctgacggtgttggcgaccaagccggccctgatcgcgctgcagctgctcaacgcggtgtttatcggcatcgtcgccggtatcggcatgctctattttcaggatttgatgccgggccggccgggcgccgccaccacgctgttcaccaacagcatctctaccggggtgatcctggccggggtgctgcagggcgtgctggtggagaatttcggtcatggttcggtgtattggatggcggcgctgctggcgctggcggcgctcgggatgagcgccaaagtgcgtgaagtgtgaggttaaacgacggcattcttgatgcaagtcattgagaaggctaaaccgggcgctcaagctgaaggcatatggcgcgcgatcgttgcgcccacgcccgtctcgctattgagatgccgccctgtcgtttagaacagtgggaacgttatggataaactcacaccgctcaaaccgcttccttccctgtgcgcccttggcgccacgctgattatctggttcctcattcccgtgccggagggcgttgcgcccaacgcctggcagctgctggcgctgtttatcggcaccatcatcgccatcatcggcaaggcgatgccgatcggcgcggtctcggtgatcgccatcgctctggtggcggtaaccggcgtcaccaaccccggcaagccgggcgccgcgctggacgacgcgctcagcggcttttccaaccagctgatctggctgatcggcttttctattatgatctccctcagcctgaacaaaaccgggctgggcgcgcgcatcggctactatttcatctcgctgttcggcaagaagacgctgggcatcgcctacgcgctgacgctggcggaaaccacgctggcgccggtgacgccgagcaacaccgcgcgcggcggcggcatcattcacccgatcatgaaatcgatcgccgacagctttggttccaaacccgagcttaataccgccggcaagatcggccgctatctgtcgctggtgaactacaacattaacccggtcacctcggcgatgtttatcaccgccacggcgcctaacccgctgattgtcagcctgatcgccaaaggcacccacggcagctttgaattgtcctggtcaatgtgggcgatcgccgccctggtgccagggctgtgctcgctgatcgtgatgccgctggtgatttatctgctgtaccccccggaggtgaaaagtacgccggatgcgccgcgtttcgcccgcgaaaagctgcaggcgctggggccggtgacgctgccggagaaaattaccctcggggtgttcgcgctgttgctggtgttgtgggccggcataccggcgatgatcttcggcccggcgctggcggtcaatcccaccaccgcggcgctgataggcctggcggtgctgctggccaccggcgtgctgagctgggaggatgtgctgaagcataaaggcgcctgggacaccgtggtgtggttctcggcgctggtgatgatggccagcttcctcggcaagctggggctaataggctggctgtcgcaaaccgtcggcaacggcatcgaccgtatgggcatgagttgggtgggcggcacgatcttgctgaccctcatctatttgtattcacactatttctttgccagcaccaccgcgcacgtgacggcgatgttcgccgccttcttcgctgccggcatcgcgcttggcgcgccaccggcactgctgggcctgatcctggcgttttcttcctcgctgatgatgtcgctgacgcattacggcaccggcaccgcgccgatcatctttggctccggctacgtgacgctgggggagtggtggaaagcgggatgggtgatgagtgtaattaacctgctgatctggatagtgatcggcggcgcatggtggaagctgctgggctactggtgaggaaaaaattcacccgccgggcggcgggtgaaggggattaattcagaaacgccggctgctgcgcttcgtagcgggagatgtccgcttcgtgctgcagcgtcaggccgatgctgtccagcccgttgatcatgcagtggcggcggaagctgtctatttcgaacggatagcttttgccgccggcgttgaccgtctggttctccagatccaccacgaactccgtcccttcgttggcgtccaccagcttgaacagctcatccacctgctgctcgctcagcgtcactggcaacagctggttgttgaacgagttgccatagaagatatcggcaaagctcggcgcgatcaccactttgaaaccgtagtcggtcagcgcccagggggcgtgttcgcgtgaagagccgcagccgaagttctcccgcgccaacaggatgctggcgcctttatagcgcggtttgttcagcacgaacgccgggttcggctgctggccggcgtcgtcgaggaagcgccagtcgttgaacaggtgctgaccgaaaccggtgcgggtcaccttctgtaaaaactgcttgggaataatggcgtcggtgtcgacgttggccgcatccaaaggcaccactaagccggtatgttgagtaaatttagccacgttagccccttagtgaatatcacggatgtcagcgaagtgaccggcgacggcggccgcggcggccattgccgggctgaccaggtgggtgcgcccaccgcggccctggcgcccttcgaagttacggttgctggtggacgcgcagcgttcgcccggattcagacggtcgttgttcatcgccaggcacatcgagcaacccggcaagcgccattcgaagccggcttcaataaagattttgtccaacccttcggcttccgcctgggccttcaccgggccggagcccggcaccacgatggcctggacgccattggcgaccttgcgccccttggcgatcgccgccgccgcgcgcagatcttcgatgcgcgagttggtgcaggagccgatgaacaccttgtcgatcggcacttcggtcaatttgatacccggcttcaaatccatgtaggccaacgctttctcggcggaggcgcgctcgaccggatcgctgaacgattccggcgccgggatcgcctgattgacggcgatcacctggccggggttggtaccccaggtgacctgcggcgcgatctcttcggcgtgcagcgtcactacggtatcgaactgggcgtcggcgtcggacttcagcgtgcgccagtaagcgaccgcctgctcccagttttcgccggttggcgcgaactgacgccccttcaggtaggcgaaggtggtgtcgtccggcgccaccagcccggctttggcgcccatttcgatcgccatgttgcacagggtcatacgcccttccatgctcaatgcctcgatcgccttgccgcagaattccaccacgtggccggtgccgccggcgctgccggttttgccgatcaccgccagcacgatgtctttggcggtaatgccctcggcggcgtcgccggtgacttcaatcttcatggtcttggcgcggccctgtttcagggtctgggtcgccagcacgtgttccacttcggaggtgccgatgccgaacgccaacgagccaaaagcgccgtgggtggcggtgtgcgagtcgccgcagacgatggtcatgcccggcagcgtcatgccttgttcaggcccaattacgtgcacgatgccctggaacgggtggttcaggtcatacagcgaaacgccgaattccgcgcagttcttgatcagctcctgcatctggatacgcgccatttcgccgctggcgttgatgtctttggtctgggtcgacacgttgtgatccatggtggcgaaggttttgcccggctggcgcaccttgcggcccatggcgcgcaggccgtcgaacgcctgcggcgaagtgacttcgtgcaccaggtgacggtcgatatacagcaacggcgtttcgttcggtgcttcgtgcaccacgtgggcgtcgtacagcttctggtataaggtcttggccatgttatgccccctgagctacaaagcgggcgatgatatcgcccatttcatcggtgctgacggctttgccgtcaccggccagatcggcggtgcggtagccctgttccaacgcctggttgatggcgcgctccacggcgtcggccgcttcatcggcgcccaggctgtaacgcagcagcagagtggcggacaggatctgcgcaatcgggttggcgatgcctttgccggcaatatccggcgcggaaccgcccgccggttcgtacaggccgaagccttgctcattcaggctggcggacggcagcatgcccatcgaaccggtgatcatcgcgcactcgtcggacaggatgtcgccgaacagattggagcacagcagcacgtcgaactgggacggatccttgatcaactgcatggtggcgttgtcgatatacatgtgcgacagcgacacgtccgggtaatccctggcgacctgattgaccacttcacgccacagaatggagctttgcagcacgttggccttgtcgatcgacgtcaccttgtggcggcgcttgcgggcggattcgaaggcgatgcgcgcgatgcgctcaatctcgaaacggtggtatacctcggtgtcgaaggcgcgctcctgcatgccctggccttcacggcccttcggctggccgaagtagatgccgccggtcaattcgcgcacgcacagaatgtcgaagccgcgggcggcgatgtcggcgcgcagcgggcagaacgcctccagcccttgatacaggcgcgccgggcgcaggttgctgaacaatttgaagtgtttgcgcagcggcaacagcgcgccgcgttccggctgctcggccggcggcagatgttcccatttcgggccgcctaccgagccgaacaggatggcgtcggcctgctcgcagccggcgacggtcgccgccggcaacgggctgccgtggcgatcgatggcgatgccgccgacgtcgtactcggcggtggtgatgcgaatgtcaaagcgttgacgcactgcgtccaacactttgcgcgcctgagccattacttccgggccgatgccgtctccgggcaagacggcaatgtgataagtcttcgtcatgttcacaccgtttcctgattattttgatgtttgttttgctgcaggcgctgcttttctttttctacctgctgtgagcgccaaatattgttcaacacgtgcaccatcgccttggcggaggattcgacgatatcggtcgccagacccacgccgtggaagcggcggccgttgtaagagaccacgatatccacctggcccagcgcgtcgcggccatggcccttggcggtcaactggtacttcaccagctcgatcgggtagtcggtgatgcgattgatcgcctgataaaccgcatcgaccgggccgttgccggtggcggcttcggctttctcttcgccgccgcagatcagtttcaccgaggcggtggccatgatgctgctgccggactgcacgctgaagtaacccaggctgaagtgctccggctcttcctgctgtttgttgatgaaggccagcgcctccagatcgtagtcgaacacctggccctttttgtcggccagcttcaggaaggcggcgtacagggtatccaggttgtaatcctgctcctggtagcccatctcttccatgcggtgtttcaccgctgcgcggccggagcgggaggtcaggttcaactgcacatccttcaggccgatcgactgcggggtcatgatttcgtagttttcgcggttcttcagcacgccgtcctggtgaatgccggaggagtgggcgaaggcgttggagccgacgatcgccttgttggccgggatcggcatgttgcacagctggctgacgatctggctggtgcggaagatttcttggtggttgatgttggtgtgcacgttcatgatgtcctggcgcactttaatcgccatgatcacttcttccagcgaacagttaccggcgcgttcaccaatgccgttcagggtgccttccacctggcgggcaccggcctgcactgcggcgatggagttgccgaccgccatgcccaaatcgtcgtggcagtgcacggagatgatggctttgtcgatgttcggcacgcggtcatacagggtagtgatgatgccgccgaactggttcggggtggtgtagccgacggtatccgggatattgatggtggtagcgccggcgttgatggcggcttcgaccacgcgacacagattgtcgatcggcgtgcggccggcgtcttcacaggagaactccacgtcgtcggtgtagttgcgggcgcgttttaccgagcgcaccgccatctccagcacttcgtcgaacgagcgcttcagcttcgattcgatgtgcagggttgaggtggccaggaatacgtggatgcggaacgcttcggcgacgcgcagcgcttcggcggccacgtcgatgtctttgtccacgcagcgggccaggccgcagacgcgactgtttttgatttggcgagcgatggtttgcaccgactcgaagtcgcccggcgaagagaccgggaagccgacttccatcacgtcaacgcccattctttccagcgccagcgcaatctgaatcttctcttttacgctcaggctggcctgcagcgcctgctcgccatcacgcagcgtggtatcgaaaataatgacttgttggctcatcggtgcattccttatcgtgttgatttcacgctaagcgggcaaaaaaaaacccgcgcagtagcgcgggtttcttatgggtgatcggctgagtcagctccgaacgtcgtccacaggcataccgcgcaaacaagatgcgttgagtagtaggcctagtagacggtgagtacggatcataagggttcagcttctcttaaattgggtgtctgcctaatttgatacgtgattggcctggcgatgtcaacacctgattgaatgcggggacaatgcatcagcccattaactaaacagaggatcattcggcaaaaaaacgacgtcttagagaaaaaaatggggccagtttgcgtgctgcttagcataaacgaatcgaatatatactgcgctaattgcttctggatttcgttgcgttaagatttgtgatgaaaaaagcaagagggattaatcacggggagcaataaaataacattttcaatacaaatggtttaaatttaactcatatgaataattgattgttttagtcataatataacaaaataatgcgtttttacacaaagtgagcggtgtttttagatggtttgattgcttatgatgtgtttttatagtttgtctcatacagtgcggcgacgttgttcaattgtattaatcattgttgatacctaattattagtactacccaggtggcattcttctcgctgacggggaaagctgctgacatgtattccatatacgacttatatcgtgtagataacacgaggttttttatcgattgatgacggtaatggcaggatttgtcgtgcaaagataagacaatgcggcgtttcattgtttgtcgagcataaggattagattatttacacaggatttagtggagtgaaatatggctgaatatgattcagaaatcgccatggtcaaagagccggcggacatccatttgcgcagcgtcgatcttaatttactgacggtgtttgacgccgtgatgcaaatgcaaaatattacgcgagccgctaattcgttagggatgtcgcagccggcggtgagcaacgcggtagcgcgcctgaaggtgatgttcaacgacgaactgttcgtgcgctgcggccgcgggatccagcccaccatgcgggccaggcagctgttcgggccggtgcggcaagcgctgcagctggtgcagaatgagttgccgggatctgagtttgagccgctgaccagcacgcgagcgttctccctgtcgctgtgcagcccgctcgatttgcgtctgggcgccgggataatcaatcacgtcaaacagatagcgccgcagcttaacctgcaaataaagtcatacattaacaataatattgaacgtcaattgcgttatcaggacgtggagtttgtcatcggctacagccgtttcgagtcggcggagtttcgcagcctggcgatgttcgacgacgaattagtgctggcggttgcgcaggcgcacccgagaataggcgaggaggtgacgccggaacacatgctggtcgagcagcatgctgcggtttccctggaaagttttggatcgttcagtaaacctttttatttagacgagccgatgctgcgcgccgtgacgcagcagtgcacggatctttacagcgtgttgaatatggtgtcgcaaacggaaatggtagcgattgcgcccgcctggttggtgcgacagcagacggaggcgttgaaaataaaggcagttcctttatgtggcaacgataataaagccacctgctacctctcctggcatgaatcctcagagcgggataaaggccaccagtggatgaaatctgtcctgattgaggcgggtaacccaaagtaaagcgataaagatgggaaccatataaagataatattcaactgagcgtttttttctcatgataaaaactaagaactatctgcgtttttattaagatatttcttggttttgcggcgatagaataacttattctcaggataaatttgttcatttagcgaaaacaattaatataaattaatattctgatttttactttccagctggaattttaaactaactcgatgtggcggcccgaacgggccgcgttttatggccgccatcaaaccttttccttcccgttttgtccaacccatgaaagcgcgaaagccggcctgagttttggctcacacttctacgctgaaatcgcttttccccctgcctgagagtaggtagactgcgcggaaaaaagtaaacacgtgtaagctgagatgagggccgcaaggcatcgttcaggcttaactgtatgattcatttcaggcttagagcactatgatcactaatctgctgcaataccatttgatccatcgtatacagcatcaaatcacccaccgagccgatcgcacagcatttcgccaatggtcgcccaacggcgagtttcaactgacctggggagcggcggctgcccgcattgatcgcattgctgccgggctgctggcgctgggcgccgaagtgcaagaacgtatcggtatcttcgccaataacacggtggcctggtcgttgaccgatctcgcgatcctgcacctgcgtggcgtcagcgtaccgctctattccaccaatacgccggcgcaggcggccttcgtcatcaacgacgctgacattcgcatcctgttcgtcggcgagcaggcgcagctggatgccgccatcgcactgcgtggcgtctgcccacagctgagttatatcatcgtgttcgacgagggcgccgatctgcgcggctgcgagatcgcacaacacctgagcgccttcgagcgcgctgccgatccggcggcttttatcgctcaacgtcggcagcgcattgaagagtgcgacctgcaggatctctttaccctgatctatacctcgggcaccaccggcgaaccgaaaggggtcatgctggactaccgcaacctggcggcgcagctctacctgcacgatgagagactgacggtcggcgaagaggatgtgtcgctcagtttcctgccgctgtcgcacgtgttcgagcgtgcctggagcttctttgtcatgcattccggcgcgcagaatgttttcctgccgaacaccgactgggtacgggaagcgatggggcaggtgcggccgacgttaatgtgcgcggtaccgcgtttctacgagaagattttcagcgcggtgcatgaaaaagtggcgcgtgccccttggctgcgccgtgcgctgttccactgggcgatcgtctgcggggagcgcaagttcctgcaagagcgggccggcaaaccgttgggcaaactgttcgaactctctcaccgctgggccgacaagctggtattgagcaagctgcgcggcattctcggtggccgggtgcgtttcttgccggcggcgggcgccaagctggatgacaatgtgatcctgtttttccaggcgatgggcgtcaacatcaagtacggctacggcatgaccgaaacctgtgcgaccgtgtcctgctgggaagaggggcatttccgcttcggctctatcggtaaaccgctgccggaggtcgaggtgcgcatcggtgaagaaaatgaaattcaggtgcgcgggccgatcgtgatgcgcggctatttcaacaaaccgttggaaaccgccgcgacctttaccgccgacggctggctgaaaaccggcgacgccggggcgatcgatgaagagggcaatctgttcatcaccgagcgcctgaaagatttgatgaaaacctccggcggcaaatacatagcgccgcagatgctggaaggcacgctggcgcaggaccgctttatcgagcaggtggcgatcatcgccgatgcgcgcaagttcgtttccgcgctgatcgtgccgtgctttgagtcgctggaagagtacgcgaagtcagtcaacctgaaataccaggatcgcctggagctgctgcgcaacggcgagatcctcgcgatgttcgaaaagcgcctgcgcgagatgcaaaaggagctggcgcgtttcgagcaggtgaagaagttcacgctgctgccggcggctttttccatggagttgggggagctgacgcccacgctgaagctgcgccgcaaagtgatcctgcagcgctatcagcgcgaaatcgactcgatgtaccaggaacaggcctgacgccgccgccgggccatgtgcccggcgaaaaaaagcggcatatccatcacctgatttagttctgtaatttccctcctgttcgaaacaatgcctagcccgacaaccctgaggctagcgcattgtttttataaagctgcgatctccagccgcttggcaataaccccgccaccgttaagccattttgccgtttgcctgccccaaattctgacgttatgttaattcgatagcgacaacccataaaaactttggggcattgccccgcagcaggcgctacgttccggcgccagagaagaataagcaagcctggaggcaaacccatggagatgttgtcaggagccgagatggtcgtccgatcgttgatcgatcagggcgttaaacatgtattcggctaccccggcggggcggtgctcgatatctacgacgccctgcatacggtcggagggatcgatcatattctggtgcgccacgagcaaggggcggtgcacatggccgacggctacgcgcgcgccaccggcgaagtgggcgtggtgctggtgacctccggccccggcgccaccaacgccattaccggcattgccaccgcctatatggactcgatcccgatggtcgtcctgtcggggcaggtgcccagctcgctgatcggctacgacgccttccaggagtgcgatatggtggggatttctcggccggtggtgaaacacagtttcctggtgaaacgtaccgaagacatcccggcggtgttgaagaaggccttttacctggcttccagcggccgccccggcccggtggtgatcgatctgccgaaagacatcgtcggcccggcggtacggatgccttatgcctatccgcaggacgtgagcatgcgttcctacaacccgacggtgcagggccaccgcgggcagatcaaacgtgcgttgcaaaccatcctggcggccaaaaagccggtgatgtacgtcggcggcggcgcgatcaacgccggttgcgaaaccgaactgttggcgttggcggagcagctgaacctgccggtgaccagcagcctgatgggactgggcgctttccccggcacccatcgccagagtgtcggcatgctcggcatgcacggcacctatgaagccaacaaaaccatgcaccatgccgacgtgatcttcgccgtcggcgtgcgtttcgacgatcgcactaccaacaatctggccaaatactgcccggacgccaccgtgctgcacatcgatatcgatccgacctcgatctccaaaacggtggacgccgatatcccgatcgtcggcgatgccaaacaggtgctggtgcagatgctggagctgttggcgcaggatgacaaggcgcaggatcacgatgcgctgcgcgactggtggcagtctatcgaacagtggcgcgcccgcgactgcctgggctacgacaaaaacagcggcaccatcaagccgcaggcggtgattgaaaccctgcatcgcctgaccaaaggcgacgcctatgtgacctccgacgtggggcagcaccagatgttcgccgcgctctattatccgttcgacaaaccgcgccgttggatcaactccggcggccttggcaccatgggcttcggcctgccggcggcattgggcgtcaagctggcgctgccggaggaaaccgtggtgtgcgtgaccggcgacggcagcattcagatgaatattcaggagctgtccactgcgctgcaatataacctgccggtggtggtggtgaacctcaacaaccgctatctgggcatggtcaagcagtggcaggacatgatttattccggccgtcattcgcagtcttacatggattcgctgccggacttcgtcaagctggccgaggcttacggccatgtcggcatcgccatccgcacgccggatgagctggaaagcaagctggcgcaggcgctggcggaaaaagagcggctggtgttcgtcgacgtgaccgtcgatgaaaccgaacatgtctacccgatgcagatccgcggcggaagcatggacgaaatgtggcttagcaaaacggagaggacctgatcatgcgccgtattttatctgtcttgctggaaaacgaatccggcgccctgtcgcgcgtggtggggttgttctcccagcgcggttacaacatcgagagcctgacggtggcgccgaccgatgatccgacgctgtcgcgcatgacgatccagaccgtcggcgacgagaaagtgctggagcagattgagaagcagttgcacaagctggtggacgtgctgcgcgtcagcgaactggtgcagggcgcccacgtcgagcgcgagatcatgctggtgaagctgcaggccagcggctacggccgtgaagaggtgaagcgctgcgccgacattttccgcggccagatcgttgatgtgacggcgacgctgtatacggtgcagctggccggcaccagcgacaagctcgacgccttcctgagcgcggtgcgtgaagtggcggagatcgtggaagtggcgcgttccggcgtggtcggcgtgtcgcgcggcgacaaaatcatgcgctgagcgcgatctggcggcgaataatcggggcgcggcgtggctgcgccctttgtttttcggtattttttgcccgattgctggcacctttcggcaaaagcggttgctaggcagtgttttctgctgttagatcgcagaggctggattgaataaccgtacgggatgccatggttaatccgagcacagccttcacttctattttcagcgtcattaaggggttaatgtgaaactggatgaaatcgcgcgtctcgcgggcgtttcgcgcacgacggccagttatgtcatcaacggcaaggcgaagcagtatcgtgtcagcgataaaaccgtcgagaaagtgatggccgtggtcagggagcataactatcacccgaatgccgtcgcggcggggctgcgcgccgggcgcacccgttctatcggcctggtgatcccggatctggaaaataccagctatacccgcatcgccaactacctggagcgccaggcgcgccagcggggttaccaattgctgatcgcctgttccgaagatcagccggataacgaaatgcgctgcattgagcacctgctgcagcgtcaggtggatgccattatcgtctccaccgccttgccgccggaacatcctttctatcaacgctgggccaacgatccgctgccgatcatcgcgctggaccgtgcgctggatcgcgagcatttcatcagcgttgtgggcgccgatcaggaagatgcctttgcgctggcgcaggagctgcgcaccttcccggctgaatcggtgctgtatctgggcgccttgccggagctttcggtgagcttcctgcgtgagcagggcttccgtcaggcctggcaagaggatccccgccacgtcgattacctgtacgccaacagctatgaacgcgaagccgccggcgcgctgtttgccgaatggctgaaaacgcacccgatgccgcaggcgctgtttaccacgtcgttctctttattgcagggcgtgatggacgtgacgctgaagcaacgcggccgcttgccgaccgatctggcgatcgccaccttcggcgatcatgaactgttggatttcctggagtgcccggtattggcggtagcgcagcgccatcgcgacgtggccgagcgcgtgctggaactggtgctggccagcctggacgaaccgcgtaaacccaagccggggctgacgcgcattcgccgcaatctgttccgccgcggcagcctgagccgcaagtagtttgcctgacaggggcccgcgttggcgggctcctgctttagacgtagtccgccacccggaacagccgccggcagtattccaggaaatagccatacaccacgcccatcgccatggataccagcgcattgctggttaccgccgccagcatttgttggccgtcggcgcctacgctccatagaatggcggcataaaccggcgactggaagctgacgtaggccagcagatcggcgaggttgcgcagcaggaactggccgcgcgggcagcggcgcgccgtgcggataaacagatcgcgatagcggccgtaaggccaggcgatcaggatgttgaccgggatcgacaacaggcgtgaagagagggattgctggaagctcatgcctgagatcaacacttctatcgccatgccggcgataaagcaatacaccaccagtgcgaacgtatcggcagcggcgctacgccagtgagtagcgggcgaaagcatgtgtcaccccttatggttaaaactctgttaaatcattcgttgttggatgttaaggctggttttttgccttttttatagtgtactcatctggattatgttttttaactaggtttatatttttatttttaacatttgttcgctttttgtcccgcagaacaggggcgtaggatggagcggagagattaaaatcggcgtttttaaataaatcgattaaaaacataaggttgcgatttttcgtttttgaaggggattttttccggcaaaaattgtggaaataaaggtgtaagaaaatgaaaccataattgtaaacaggtattttgggaataatcttaccaagttgatttgaatcgaaattacttctgctcgtaatatccgagccatttatttttatcgcggcctcatcacggcggtgcaaattgaagtaaaatagcgcccggttttacggtgaataacgattgagcgttattaactcaaggagttatggccttattccgcgatcggttcgcctggcgccgagccttggcgggcgcggctcgccagcggttaccgccctgagattgccgagctgaaaaatgagacatggcttgcagaaggaagtaatgagttaattaatcgccagttcgtcaggtttttaatcagattctttccgcttagaaaattctctccgtttatcatggtgttaatttttaatcgtcgaataatcagagtttctttcgcgagtcagctcccaaaatgaccagagaaatattgccaaagcgctggcgctctggcttgacaaggttttcataccctccgtaaactccattgtgtgggaatttgtggggtaaagtggtgaaaacggtcactaaggggtagctcaggaatgttccgtggagcgacgatggtcaacctcgacagcaaagggcggctcgccgtacctacccgatatcgggaattgctcaacgaggaatcgcaaggccaaatggtctgtaccattgacctccatcagccctgtctgctgctttatcctttgcccgaatgggaaattattgaacaaaaattatcacgtctgtcgagcatgaatcccgccgagcgccgcgttcagcgcctgctgttggggcatgccagtgagtgtcagatggatagtgccggtcgtttgctgttagccagtacgctgcggcaacacgccgggctcacgaaagaagtgatgctggtcggtcagttcaacaagtttgaactgtgggatgaacagacctggtatcaacaagtcaaggatgatattgacgctgaacagtcggctcaggaaccgttgtctgagcggctacaggacttgtcgctataagcatgttggaaaactataaacacaccaccgtcctgctggacgaagccgtcaacggcctcaacatccgcagcaacggcatatatatcgacggtacttttggtcgcggtggccattctcgtctgattctgtcccagctggggccggaagggcgcttgctggcgattgaccgtgaccctcaggcgattgcagccgccaaatctattgaagatcctcgttttaccatcgtacacggcccattttccgagttgtcgcactatgtgcgggagcgcgagctggtgggcaagatcgacggcgttctgctcgatctgggcgtttcctcgccgcagcttgacgacgcggagcgcgggttctcctttatgcgcgatggcccgctggacatgcgcatggatccgtccaccggcctgtctgccgcggaatggctgatgaaggccgaagcggacgacatcgcctgggtgctgaaaacctttggcgaggagcgtttcgccaagcgcatcgcgcgcgccatcgtggaaagaaaccgcgtggagccgatgacgcgcaccaaagagctggcggatctgatcgccgatgccagtccgttccgggaaaagcacaagcacccggcgacgcgcagcttccaggcgatccgcatctatatcaacagcgagctggaagagatcgagcgtgcgctcgacggcgcgctggaagtgctggccccacagggccgtttgtcgataatcagcttccactcgctggaagaccgcatcgtcaaacgctttatgcgtcaccatagccgcggcgcccaagtgccggccggcattccgttgaccgaagagcagctgcgcggcatgggcggccggacgctgaaagcgctgggcaaaatgatgccgtcggaagcggaagtggcggacaacccgcgtgcgcgcagctcggtgctgcgcattgctgagaggatgcccgcgtgatcggcaacgaacgtcacggtctggttggggtcattggcggcgatctgctgcgcaacgccaagatccccctgattttactgattgcgtcactggtctccgcgattttcgtggtgactaccgcgcaccgcacccgcctgctgaccgccgagcgcgaacagctggttctggagcgcgatgcgctggacatcgagtggcgcaacctgattttagaagagaacgccctcggcgatcacagccgggttgaacgtatcgcgacagaaaaactgcagatgcaacacgttgatccatcgcaggaaaatatcatcgttaaacaatgaatggtttaaccggaataatgacacggagtagaaaggaaacgcatgaaagcagcgcgccccggtaagttgagacgccaggaagatcaggccagctttgtcagctggcgttttgcgttgctgtgcggctgcattttgctggcgatggttggcctgatgttgcgcgtcgcgtacctgcaggtcatcaaccccgatcgtctggtgaaagaaggcgacatgcgttcgctgcgcgtgcaggaagtgccgaccgcgcgcggcatgatcagcgatcgcgccggccgtccgttggcggtcagcgtgccagtgaatgcggtgtgggccgatccgaaagagctgaacgagcgcggcggcatcacgctggatagccgctggaaagcgctttccgatgcgctgaacatcccgctggaccaactctccaaccgcatcaacgccaacccgaaagggcgcttcgtttatctggcgcgccaggttaacccggcgatcggcgactacatccacaaactcaagctgccggggatctacctgcggcaggagtcgcgccgttactatccggcggggcaggtgacgtcgcacatcatcggcgtgaccaacatcgacgggcaaggcatcgaaggcgtcgagaagagcttcgaccgctggctgaccgggcaaccgggcgagagaacggtgcgtaaggatcgtttcggccgggtgatcgaagacatctcctccgtcgacagccaggcggcgcacaacctggtgctgagcgtcgatgagcgcctgcaggcgctggtgtatcgcgagctgaacaacgccgtggcgttcaacaaggccgaatcgggcactgcggtgctgatcgacgtgaacaccggcgaagtgctggcgatggccaacagcccgtcttacaacccgaacaacatggccggtacgccgaaagaaaccatgcgtaaccgcgccatcaccgatatttttgaacccggttcaaccgtgaagccaatggtggtgatgaccgcactgcaaaacggcgtggtgagagaaaacagcgtgctgaacaccatcccgtatcgcattcagggccacgagatcaaagacgtggcgcggtactcggagctgtcattgaccgggatcttgcagaagtcgagtaacgtcggtgtttcaaagctggcgttagcgatgccgtcctcagcgttagtagatacttactctcgttttgggctgggaaaagcgaccaatttggggctggtcggagaaagcagtggcatatacccaaaaaaacaacggtggtctgacatagagagggccaccttctctttcggctacgggctgatggtaactccgttacagttggcgcgagtctatgcaacgatcggcagcctgggcgtgtatcgcccattgtcgatcaccaaggttgaccctccggtcgccggcgagcgcgttttccctgaacctctggtgcgcaccgtggtgcacatgatggaaagcgtggccttgccgggcggcggcggcgtaaaagccgccatcaagggataccgtatcgccatcaaaaccggtaccgcgaaaaaagtgggcccggacggcaaatacgtcaaccgatacatcgcttataccgccggcgtcgcgccggcaagtaacccccgttttgccctggtggtcgtcatcaacgacccgcagggtgggaaatactatggtggcgcaatctccgcgccggtgttcggcgccatcatgggcggcgtattgcgcaccatgaacgtcgagcctgacgcgttgcccaccggtgacaaaagcgaattagtgattaacaagaaagagggttcaggtggcagatcgtaatttgcgcgacttactcgccccgtgggtgccgacggcacccgggcgcgcgctgcgggaaatgacattagacagccgtgtggcggctgccggggatctgtttgtcgccgtggtcggccatcaaacggatgggcgccgctatattccgcaggccatcgcgcagggcgtcgccgctgtgatcgccgaggctgacggtcaggccgaagacggcgccatcgttgagatgcacggcgtgccggtgatctacctgagccaactgaaccagcgcctttccgcgctggccgggcgtttttaccatcagccgggcgagcgcttgcgcctggtcggcgtgaccggcaccaacggcaaaaccaccaccacgcagctgctggcgcagtggagccaactgctgggcgaaaccagcgcggtgatgggcaccgtcggcaacggcctgctgggccaggtgtgtccgaccgagaataccaccggttctgcggtggatgttcaacacgtattaaacgagttggcggaacagggcgcgaccttcgccgccatggaagtttcttcccacggtttggtgcaacaccgggtagcggcgctgccgttcgctgcggcggtcttcaccaacctgagccgcgatcacctggattaccacggtgatatggccaattacgaagcggccaaatggtcgctgttcgccgcccacaacgtggggcaggcgatcatcaacgccgacgatgaagtcggtcagcgctggctcggcaaattgccggatgcggtagcggtgacgatgcaggacaacctgcagccgggctgccacggccgctggctgaaaaccacggcggtcgactatcacgacaacggcgcgactgttcgtttcagctccagctggggcgacggcgagatcgaaagccgcctgatgggcgcgttcaacgtcagcaacctgctgttggcattggcgacgctgctgtcgttgggctacccgctggaggcgctggtggaaaccggcagccgtctgcagccggtctgcggccgcatggaagtgtttaacgcgccgggcaaaccgacggtagtggtggattacgcccacacgccggatgcgctggagaaagcgctggaagccgcgcgtctgcactgccaggggcagctgtggtgtgtgttcggctgcggcggcgatcgcgacaagggcaagcgtccgctgatgggcggcatcgccgagcagttcgccgatcgcgtggtgatcaccgatgacaacccgcgcaccgaagagccgcgcgcgattatcaacgacatcctgaccggattgctggacgccgggcaggcgctggtgatccacggccgcgccgaagcggtgaccagcgccatcatgcaggcgcaggagcaggatgtggtgctggtggcgggcaaaggccacgaagattatcagctggtgggcaaccgccgcctggattactccgaccgcacgacggtcgcccgactgctgggggtgctggcatgatccctgtctctcttcagacactggctgaggtattgagcgctgaactggtgggcgccgattgccaaattgtcgaggtgacgacagacacccgcaaggtgaccgccggttgcctgtttgtggcgctgaaaggcgagcgtttcgacgcgcacgacttcgcggcggatgccgtagccgcaggcgccggggcgctgctggtcagtaagcgcttatcagtggacgcgccgcagctggtggtgcaagacacccgtctggcgctgggccagcttggagcctgggtgcgtcaacaggtgccggcgcgcgtggtggcgctgaccggttcctcgggcaagacgtcggtgaaagaaatgaccgccgccattctgcgtgaatgcggcgaagtgctgtataccgccggcaacttcaataacgacatcggcgtgccgctgacgctgttgcgtctggagccgcagcatgattttgccgtgatagagctgggcgctaaccacattggcgaaattgcttacaccaccgcattgacgcgtccgcagaccgctttggtgaacaacctggcggccgcgcacctggaaggcttcggctcgctggccggcgtcgcccaggcgaaaggtgaaatctttaccggcctgccggccgacggcgtggcgatcatcaacgccgataacaacgactggccgcactggcagagcatgctgggcggcaaaaccgtctggcgcttctcgccgcaggcggccgaaggcgtggacttcttcgcggacgaggtgcgggtgaacggcgcaggcacgcagtttacgctgcacagcccgttcggcagcgccgagatcgcgctgccgctgccggggcgccacaacgtggccaacgcgttggcggccacggcgctggcgatgtcggtaggcgcccccctggaagcggtgcgtcaggggttaaaacaattgcaggcggtgccggggcgtttgttcccggtggcgctggccgaaggcaagctgctgctggacgacagctacaacgccaacgtcgggtcgatgaccgcggcggcgcaggtgctggcggagatgccgggctaccgcgtgatggtggtcggcgatatggccgagctgggcgcagaagcggaagagtgccaccgtcaggtgggcgaagccgcccgtctggccggggtcgacaaagtcatcagcgtcggcgggttgagccgcgtgctgagcgaagcctccggcaatggcgaacattatcaggacaagacagcagtgatcgcgcgcgtggcggaattactgtcggaacatgcggtcatcaccgtgttaatcaaaggttcacgtagtgccgcaatggagcaggtagtacgcgcgttacaggagaaagcaccatgttagtttggctggccgagcatttggtcaagtattactcaggcttcaacgtcttttcttatctgacgttccgagccattgtcagcctgctgaccgcgctgttcctgtcactgtggatgggcccgcgggtgatcaagcgtctgcaagaaatgtccttcgggcaggtggtgcgcaacgacggccccgagtcgcacttcagcaagcgcggcacgccgaccatgggcggcatcatgatcctgacctccatcaccatttcggtgctgatgtgggcctacccgtccaacccgtatgtctggtgcgtgctgttcgtgctggtgggttacggtattgtcggtttcgtcgacgactaccgcaaggtggtgcgtaaggacaccaaagggctgatcgcccgctggaagtatttctggcagtcggtgattgcgctgattgtcgcattcgccatgtacgccgtaggaaaagacacgccagccaccgagctggttgtgccgttctttaaggacgtgatgccgcagctgggcctgctgtacatcctgctggcctatttcgtcatcgtcggcaccagcaacgcggtcaacctgactgacggcctggacggcctggcgattatgccgacggtattcgtggcggccggtttcgcgctggtggcctgggcgaccggtaacatgaacttcgccaactacctgcatattccgtatctgcgtcatgccggtgagttggtgattgtctgcaccgccatcgtcggcgccggcctcgggttcctgtggttcaacacctacccggctcaggtgtttatgggcgacgtcggttcgctggcgctgggcggcgcgctgggcaccatcgcggtgctgctgcgccaggagttcttgttggtgatcatgggcggcgtgttcgtggtagagacgctgtcggtgatcctgcaggtgggatcgttcaagctgcgcggacaacgcattttccgcatggcgccgattcaccaccactatgaattgaaaggctggccggagccgcgcgtgatcgtgcgcttctggatcatttcgctgatgctagtgctgattggcctggcaacgctgaaggtgcgttaatcatggcagactatcagggtagaaaagtcgtcatcatcgggttgggcctcaccggcctgtcctgtgtcgatttcttcatggcgcgcggcgtgacgccgcgcgtgatggatacccgtatcgcgccgccagggttggacaaactgcctgaaagcgtggagcgccatctgggcgatctgaaccaggactggctgctggcggcggatctgatcgtcgccagcccgggcgtcgcgctggcgaccccggcattgagcgccgcggcggaagccggcgtggaaatcgtcggcgacgtcgaactgttctgccgcgaggcgcaggcgccgatcgtggcgattaccggctccaacggcaagagcaccgtcaccaccctggtgggtgagatggcgaaagccgccggttgggcggtgggcgtgggcggcaatatcggcctgccggcgctgagcctgttgcgccaggaatgtcagctttacgtgctggagctgtccagcttccagctggaaacgacgcatagcctgcgggcggcggcggcgaccatcctgaacgtgaccgaagatcatatggatcgctatccgttcggcctgcagcagtatcgcggcgccaagctgcgcgtgtatgaaaacgccgcggtgtgcgtggtgaacgcggacgatgcgctgaccatgccggtgcgcggcgccgacgaacgctgcgtcagcttcggggcggatgtgggtgactatcacctgaaccgtcagcagggcgaaacctggctgcgggtgcgcggtgagaaggtgctgaatacgcgcgagatgaagctgaccggtcgccacaactacaccaacgccctggcggcgctggcgttggcggatgcggtcaatatcccgcgtgcctccagcctgaaggcgttgaccaccttcaccggcctggcgcaccgcttccagctggcctgggagaacaacggcgtgcgttggatcaacgattccaaagccaccaacgtcggcagcaccgaagcggcgctgaacggcctgcaggtggacggcacgctgcatctgctgctgggcggcgacggcaagtccgccgatttctcgccgctggcgcgctatctgcagggcgacaacgtgcggctgtattgctttggccgcgacggcgcccagctggcgcagctgcggccggaagtggcgacgctgaccgagaccatggagcaggcgatgcgcaccatcgccggccgcgtacagcccggcgatatggtgctgttgtcgccggcctgcgccagtctcgatcagttccgtaattttgaagtgcgcggcgatgagttcgcccgcctggcgcaggagcttggcggatgaaactacgcttgccgaacttcgggctgacagaacggctgaaagactgggtgaccggcgcgcgcgacaacgacgcggtcaacatggtgctgtacgatcgcaccctgctgtggctgaccttcgggttggcgatcatcggcttcgtgatggtgacctcggcgtcgatgccgatcggccaacgcctggcggacgatccgttcctgttcgccaaacgcgatgcgctgtacctcggcctggcgttcggcttgtctctggtgacgctgcgcatcccgatggaagtttggcagcgctacagcaacgtgatgctgctgatgtcgatcgtgatgctgctgatcgtgctggtggtggggagctcggtgaacggggcctcgcgctggatcgcgctcggcccgctgcgtattcagccggcggagctgtccaagctgtcgctgttctgctatctggcgagctatctggtgcgcaaggtggaagaggtgcgcagcaacttctggggcttctgcaagccgatgggcgtgatggtggtgctggcggtgctgctgctggcgcagccggacctcggcaccgtggtggtgctgttcatcaccacgctggcgatgctgttcctagccggcgcgaaaatgtggcagttcctggcgatcatcggctccggcgtgttcgccgtggtgctgctgattatcgcggaaccctaccgtatgcgccgcgtgacctcgttctggaacccgtgggccgacccgttcggcagcggctaccagctgacccagtcgctgatggcattcggccgcggtgagttctgggggcaggggctcggcaactcggtgcagaaacttgagtatttgccggaagcgcacaccgacttcatcttctccattttgggtgaagaactgggctatatcggtgtggttttagccctgttaatggtattcttcgtcgcttttcgcgcgatgtccatcgggcgccgcgcgctggagatcgaccaacgcttctccggcttcctggcctgcgcgatcggcgtgtggttcagcttccaggcgctggttaacgtcggcgccgccgcaggcatgctgccgaccaaaggtctgacgctgccgctgatcagttacggcggctcgagcttgctgattatgtcgacggcgatcgtgctgttgctgcgaattgattatgaaacgcgcctgaccaaggctcaggcgtttgtgaagaggtaagggatgagcgggaaacctaagcgtttaatggtgatggcaggcggtaccggcgggcacgtgttcccggggctggcggtcgcgcatcatctgatggcgcagggctggcaggtgcgctggctcggaaccgcagaccgaatggaagccgatctggtgccgaagcacgggatcgagattgattttatccgcatctccggcctgcgcggcaaaggcctgaaggcccagttgacggcgccgctgcggatctggcaggcggtgcgccaggcgaaagccatcatgcgcagctatcagccggatgtggtgctggggatggggggctacgtttccggccccggcggcctggcggcctggcagtgtggcatcccggtggtgctgcacgagcagaacggcatcgccggtttgaccaaccgctggctggcgcgcatcgccgccaaagtgatgcaggccttccccggcgcgttcccgaacgccgaggtggtgggcaacccggtacgtaccgacgtgttggcgctaccgttgccggcggagcggttgcaggggcgcgaaggcccgatccgcgtgctggtgattggcggaagtcagggcgcgcgcgtgctgaatcagacagttcctgaagtcgcggcgcgtttgggcgatagaattacgctctggcatcaggttggcaagggcgcgctggaaacggtgctgcgcgattacgaaagggtagggcagacgcagcacaaggtgaccgagttcatcgacgacatggccgccgcctatgcctgggccgacgtggtggtctgccgctccggcgcgttgaccgtcagcgaaatcgcggcggcggggctgccggcgatcttcgtgccgttcatgcataaggatcgtcagcagtactggaatgcgcgtccgctggaagaagccggcgcggcgaagattatcgaacagccgcagttcaacgccgatgtggtggccgaactgctggcgagctgggatcgcaagacactgctggccatggccgagaaagcgcgcgcggtcgccattccggacgccaccgagcgcgtggcggcggagctggtgcggctcgccaagtaacgagtgcaggggttcggtgcgccgaacctgaataaaagcaatgtgatgtagggccggggtaccggatccggattagagagagtgatgaatacacaacaactggcgaaactacgtactatcgtgcccgagatgcgtcgcgtccggcacattcactttgtcggcatcggtggcgccggcatgggtggtatcgccgaagtgttggcaaacgaagggtatcagatcagcggctccgacctggcgccgaatccggtgacccaacagctgagcgcgctcggagcgacgatttatttcaatcaccgtccggaaaacgtgctggatgcgagcgtggtggtggtctctaccgccatctccgccgacaacccggagatcgtcgccgctcgtgaagcgcgcatcccggtgatccgccgcgctgaaatgctggcggagctgatgcgttttcgtcacggcatcgctattgccggcacgcacggcaaaaccaccaccacggcgatggtctcgagcatttatgccgaagcccgcctggacccgaccttcgtcaacggcgggctggtgaaggcggcgggtacccacgcacgactggggtccagccgttatctgatcgcggaagcggatgagagcgatgcgtcgttcctgcatctgcagccgatggtggccgtggtcaccaacattgaagccgaccacatggacacgtaccagggcgacttcgagaacctgaagcagacgtttatcaatttcttgcacaacctgccgttctacggccgtgcggtgatgtgcattgacgatccggtggtgcgtgagctgttgccgcgcgtggggcgccataccaccacctacggcttcagtgaggatgccgatgtgcgcatcgaagactaccggcagattgggccgcaggggcactttaccctgagccgtcaggacaaaccgttgctgacggtgacgctgaacgcgccgggccgccacaatgcgttgaacgcagcggcggcggtggcggtagcgaccgaagaaggcatcgacgacgaagatatcctgcgcgcgctggcgggcttccagggcaccgggcgccgcttcgatttcctcggcgagttcccgctggaaccggtcaacggcaaagcgggcagcgcgatgctggtggacgattacggccaccatccgaccgaggtggacgccacgctgaaagcggcgcgcgccggctggccggacaagcgtctggtgatgatcttccagccgcaccgttatacgcgcacccgcgatctgtacgacgatttcgccaacgtgctgtcgcaggtggatgtgctgctgatgcttgacgtgtacgccgccggcgaagcgccgatcccgggcgcggacagccgttcgctgtgccgcaccatccgcagccgcggcaagctggatccgatcctggtttccgatgccgatagcgtgccggaaaccctggcgcagctgctgcaggatgaagacctggtgctggtgcagggcgccggcaacgtgggcaaaatcgcccgtaaactggccgagctgaagctgcagccgccgaagaaagaggaggagcaccatggctgataaagttgcagttctgctgggcggcacctccgccgaacgcgaagtttccctgcagtccggcgccgcggtgctggccgggttgcgcgaagccggtatcgatgcgcacggcgtcgacacccgcgatttcccggtgacccagttgaaagagcagggattcaccaaagtatttatcgcgctgcacgggcgcggcggcgaggacggcaccctgcaagggctgctggagttcctcgaactgccttataccggcagcggcgtgatggcctcggcgctgaccatggacaaatggcgcaccaagatggtgtggcagtcgatgggcttgccggtagcgccttacgtggcgctgaatcgccagctgtacctcggcgccgaaaaagcggcgctgctggcgcgcgtggcggatctcggtttgccgctgatcgtcaagccgagccgcgaaggctccagcgtcggcatgagcaaggtcaccgaaagcgcggcgttggcagcggcattggaagaggccttccgccatgacgacgacgtgctggtggagaagtggctgagcggcccggaatacaccgtagcgatgctgggcgaccaggtgctgccatcgatccgcatccagccggccggcgtgttttatgactaccaggccaagtacatttcggacgatacgcagtacttctgcccgagcggtttgagcgccgagcaggaagctgagatggcggcgttggcgctgcgcgcctaccgcggtctggactgcagcggctggggccgcgtcgacgtgatgcaagacagcgatggtcgcttctatctgcttgaggtgaacacctctccgggcatgaccagtcatagcctggtgccgatggcggcgcgccagtttggattaagcttctcgcagttggtggcgagaattttggagttggccgactgatatgtcgcaagctgccctgaatgcgcgcgatcgcgaggtggataacggcccgcgccgcagcaatggaacccagttggcgggaatgattttcctgctgatggtgttgggaacggtcgtgtggagcggttgggcggtgcttggctggatgaaagacgccagccgcctgccgctctcaaggctggtggtgaccggcgaacgccattacaccaccaacgatgatattcgtcaggcgatcctggcgctgggcgcacccggcacctttatgacgcaggatgtggacgtcatccagcagcagatcgaacgtctgccgtggatcaagcaggccagcgtgcgcaaacaatggccggatgagctgaagatccatctggtggagtacgtcccggtggcgcgctggaacgatttgcacatggtggacgccgagggcaaagcgttcagcgtaccggcggagcgggcgggcaagcagaagttgccgctgctctacgggccggaagggagcgagcaggatgtgctggaaggctatcgggcgatgagcgccacgttggcggccagcaaatatacgctgaaaatggcggcgatgaccgcgcgccattcctggcagctggcgctggacaacgatgtccggcttgagctggggcgcgatgaccgcaacgggcgtttgcagcggtttatcgagctttacccggtattgcagcagcagggccaggcggagagcaagcgtgtcagctatgtcgatctgcgctacgagtccggcgcttcggtagggtgggctccggtgttggtcgatccgcaggcgcttggcggtcagcaaaacagtaatcagcaacagaatcaggcacaggcaaaacaacaatgatcaagtcgacggacagaaaactggtagttggactggagatcggtactgcaaaagtctccgcgttggtaggggaagttctgcccgatggcatggtcaacattatcggggtgggcagctgcccgtctcgcggtatggataagggtggcgtaaacgacctggaatcggtggtgaagtgcgtacagcgcgccatcgatcaggccgagctgatggcggactgccagatctcttcggtgtacctggcgctgtcgggcaaacacatcagctgccagaacgaaatcggcatggtgccgatctcggaagaggaagtgacgcaggacgacgtggagaatgtggtgcacaccgccaaatcggtgcgcgtgcgcgacgaacaccgtatcctgcacgtgattcctcaggaatacgccatcgattatcaggaaggcatcaaaaacccggttgggctgtccggcgtgcgcatgcaggccaaggtgcatctgattacctgccataacgatatggcgaagaacatcgtcaaggccgtggaacgttgcggcctgaaagttgaccaacttattttcgccggtctggccgcgagctacgcggtgctgaccgaagatgaacgcgaactcggcgtttgcgtggtggatatcggcggcggcaccatggatatggcggtgtataccggcggtgcgctgcgccacaccaaagtgatcccttatgccgggaacgtggtcaccagcgatatcgcctacgccttcggcacgccgccgaccgatgcggaagcgattaaagttcgacacggttgtgcgcttgggtcgattgttagcaaggatgagaatgtagaggtgcctagcgtcgggggacgtcctccgcgcagtctgcaaagacagacgctggctgaagtcattgagccacgctacaccgaactgttgaatctggttaacgatgaaattttgcaattgcaggagcaactgcgtcagcaaggggtgaagcatcatctggcggcaggtatcgtgctgaccggtggcgccgcccagattgatggcctggcagcctgtgcgcaacgggtgttccacactcaggtacgcatcggccaacccttgaacatcacgggtctgacggattatgcgcaggagccttactactcgacggcggtaggtctgctgcactatggaaaagagtctcacctgagcggtgagacagaagtagaaaaacgcgcctcggtgggcaattggtttaaacgcatcaatagctggctgagaaaagagttttaatgtttcaacaaagagatcatgctgagtaatctttttatgatctcgcagcgacaggcacaaaacggagagaaactatgtttgaaccaatggaactaaccaatgacgcggtgattaaagtcatcggcgtcggcggcggcggtggcaacgccgttgaacacatggtgcgcgagcgcatcgaaggtgttgaattcttcgctgtgaacacggacgcccaggcgctccgcaaaacggcggttggccaaaccatccagattggtagcggtattaccaaaggtctgggtgcgggcgcgaaccctgaggtgggtcgcaattcagcggaagaagaccgcgaagccctgcgcgcagcgctggacggcgcagacatggtcttcatcgcagccggcatgggcggcggtaccggtaccggtgcggcgccagtggtggctgaagtggctaaagatttgggtattctgaccgtggccgtggtgaccaagcctttcaacttcgaaggcaagaagcgcatggcattcgcggagcagggtatcgctgaactgtccaaacacgtggactcgctgatcaccatcccgaacgacaagctgttgaaagttctggggcgcggcatctctctgctggacgcgttcggcgcggccaacgacgtgctgaaaggcgcggtgcagggtatcgccgagctgatcacccgtccgggcctgatgaacgtcgacttcgccgacgtgcgcaccgtgatgtccgaaatgggctacgcgatgatgggttccggcgtggcttgcggtgaagaccgcgccgaagaagcggccgaaatggcgatctccagcccgctgctggaagacatcgacctgtccggcgcgcgcggcgtgctggtcaacattaccgctggtttcgatctgcgtctggatgagttcgaaactgtgggtaacaccatccgtgcattcgcttccgacaacgctaccgtggttatcggtacctcgctggatccggaaatgaacgacgaactgcgcgttaccgtggttgcaaccggtatcggtatggacaagcgtcctgaaatcactctggtgaccaataagcaggccagccagccagtgatggatcaccgttatcagcagcacggcatgtcgcctctgccgcaggaagtgaaacctgccgccaaggtggtcaacgaccaagctgcgcagccgaataaagagcccgactatcttgatattccagccttcctgcgtaaacaggcagactaagaatatcctgagaatttggaatctccgctctttgtgctaaactgtcccgccggccatgctgtatgcttggctggtaggatggataacattgcgagataaaacgatgatcaaacaaaggacattaaaacgtattgttcaggcgactggcgtcggtttgcataccggcaagaaagtcacgctgacaatgcgcccagcgccggctaataccggggtcatctatcgtcgcactgacttgaatccaccggttgattttccggctgatgcaaaatccgtgcgtgataccatgctctgtacttgcctggtgaatgagcatgacgtgcgtatttcgaccgttgagcacctcaacgccgcgctggctgggctgggcatcgacaatatcgtcatcgaagtcgacgccgctgaaatcccaatcatggacggcagcgccagtccgttcgtgttcttgctgctggatgccggcatcgaagaactgaactcggcgaagaaattcctgcgtctgaaagagaccgtgcgtgttgaagatggcgacaagtgggccgagctgtccccgcataacgggttccgcctggacttcaccatcgacttcaaccacccggctatcgacgccagctctcagcgctaccgtcttgatttctcggctgagtcgttcgtgcgtcaaatcagccgcgcgcgcaccttcgggttcatgcgcgatatcgaatatctgcagtcccgcggcttggccctgggcggcagcttcgattgcgccatcgtggtagatgactaccgcgtgctgaacgaagacggtctgcgtttcgaagacgagttcgtacgtcacaaaatgctggacgccatcggcgacctgttcatgtgcggccacaacatcattggcgcgttcaccgcgttcaagtctgggcacgcgctgaacaacaaactgctgcaggccgtactggccaagcaggaagcgtgggaatacgtgaccttccaggacgaagccgaaatgccgttggcattcaaggcaccgtctaccgtattggcgtaaggtctgaattcctcgcctgctgcgaataacggcaggcgcatcctctgagagcctgagaattcaggctcgtgatgccgtctgatgttttgcagttgtgtcgctgattacttatcacgactggttgtgttggtaccctctccggccaatgcagccagccgttccaatatcttgcgcagtttctccgggctacggctcgccaatcccctcagctcttccgcactttccagactcaaatgacgcatcggcacggttttttccggcgctttctcggcgttttgcacctggttgctgcctttcgccatcaaggccggattaatcctgatgtcgatcgacgacaatgatggtagaatttgcgctcgtagtgcagacagcaaagcgggttgttcgtagcgcaagcgcatcatccaactggcatttgccgtttcgagcactaaaataccctgtcggaaattcgcgacgcggcaccagggatgcaggggagcgggcaacaggcccttcactgcacggttaagcttgagcagcgccaccgcgcgttgctggacgttatgcagcggccctttgctgccggcagacgcgtcgtcgaacaggacatctaataattgtggacggctatcgcgcataatgggctccggcggattataaactcgtgatcggtattctaaatcgttggcgacaatttggcagacgttatttctggccccatctcctgttagggatggttgcggccacgcttggcgcgtcttccaatttgtccggcgctcccgatcaggccgcactgccgaatacgtcgtccagccttaaccggcaaaattcggccaacggcaccttcaccagcctggccctgctgcaggacgcgcaccgccgccctaccttcagcgtagattattggcagcagcatgcactgcgcaccgtcattcgtcacctctctttcgcgctggcgccgcaggcggtttatgcgcgggtacaggagagcgaagtcgaagcggaaccgcctttgcaggtagcgcaactggcgctgctgtctaccctcaatgcgctgctgacgcatgagccgaagccaccgaccatcattcgtcacacccaccttgaggtgctgccaacgctggcgcggcaccagaccggcctgtgggtggctcaggtgcaaggcattcgcgccgggcccgtcgttctcgtctgactccgcccttagggcataaaaaccataaataatagcaagttgactgccgccttcggccgtcatgacagagatatcaaacatcatgttagtgaaattattaaccaaagtttttggcagccgtaacgatcgtaccctgcgccgcatgcgcaaagtggttgagcagatcaaccgcatggaaccggacatggaaaaactgtccgatgacgagctgaaagcgaaaaccaacgagttccgcgcacgcctggaaaaaggcgagtcgctggaaagcctgatcccggaagccttcgccgtggtgcgcgaggcgagcaagcgcgtgttcggcatgcgtcacttcgacgtgcagctgctgggcggcatggtgctgaacgaccgctgcatcgccgagatgcgtaccggtgaaggtaaaaccctgaccgcgacgctgccggcctacctgaacgccctgagcggccgcggcgtgcacgtggtgaccgtcaacgactatctggcgcagcgtgacgccgaaaacaaccgcccgctgttcgagttcctcggcctgagcatcggcatcaacctgccgggcatgccggcgccggccaagcgtgaagcttacgccgccgacatcacctacggcaccaacaacgaatacggcttcgactacctgcgcgacaacatggcgttcagcccggaagagcgcgtgcagcgcaaactgcactatgcgctggtggatgaggtggactccatcctgatcgatgaagcgcgtacgccgctgatcatctccggcccggccgaagacagctccgagatgtacatcaaggtcaacaagctgatccctaaactgatccgccaggaaaaagaagactccgacaccttcaagggtgaagggcacttctcggtggatgagaaggcgcgccaggtccacctgaccgaacgcggcctgatcctgatcgaagagatgctggtggaagccggcatcatggatgaaggcgaatcgctgtactcgccgaccaacatcatgctgatgcaccacgttaccgccgcgctgcgcgcccacgtgctgttcacccgcgacgttgactacatcgtgaaagacggcgaagtgatcatcgtcgatgaacacaccggccgtaccatgcagggccgccgctggtccgacggtctgcaccaggcggtggaagccaaagaaggcgtggagatccagaacgagaaccagacgctggcttcgatcaccttccagaactacttccgtctgtacgagaagctggccgggatgaccggtaccgccgataccgaagccttcgaattcagctcgatctacaagctggacaccatcgtggtgccaaccaaccgtccgatgatccgtaaggacatgccggatctggtgtacatgaccgagaaagagaagatcggcgccatcatcgaggacatccgcgagcgtaccgccaaaggccaaccggtgctggtgggtaccatctcgatcgagaaatccgaagtggtgtcccgtgagctgaccaaagcgggcatcgaccacaaggtgctgaacgccaaattccacgccatggaagcggacatcgtcgcccaggccggccagagcggtgcggtaaccatcgccaccaacatggcgggtcgtggtaccgatatcgtgctgggcggcagctggcaggccgaagtggcgctgctggaagcgccgaccgaagagcagatcgaagccgtcaaagccgcctggaaagagcgccacgacgcggtgctggcggcgggcggcctgcatatcatcggcaccgagcgccatgaatcgcgccgtatcgataaccagctgcgcggccgttccggtcgtcagggcgacgccggttcatcccgcttctatctgtcgatggaagatgccctgatgcgtatcttcgcctcggatcgcgtgtccggcatgatgcgtaaactgggcatgaaagaaggcgaagcgattgagcacccgtgggtgaccaaggcgatcgccaatgcccagcgtaaggtagagagccgcaacttcgacatccgtaagcagctgctggagtacgatgacgtcgccaacgatcagcgccgcgccatctacagccaacgcaacgaattgctggacgtgtccgacgtgagcgaaaccatcgccagcatccgcgaggacgtgttcaagagcaccatcgacaactacatcacgccgcagtcgctggaagaagagtgggatattcaggggctggaagagcgcctgaagaacgacttcgatctggagatgccgatcgcccagtggctggacaaagagccggagctgcacgaagagacgctgcgcgaacgcattctggagaacgccaaagagcagtatcagcgtaaggaagaagtggtcggcagcgagatgatgcgcaacttcgagaagggcgtgatgctgcagacgttggattctctgtggaaagagcatctggcggcgatggactacctgcgccagggtatccacctgcgcggttacgcgcagaaggatccgaagcaggagtacaagcgtgaatccttcaacatgttcgccaccatgctggaatcgctgaaatatgaagtgatcagcgtgctgagcaaggtacaggtgcggatgccggaagaggtggaagcgctggaacagcagcgccgtgaagaggccgagcgtctggtgcagcagcaacagctgagccaccacgacgagaacgcgctggtgactgaagatccgaacgcgccggcgaccgccgagcgtaaagtggggcgcaacgatccttgcccatgcggttccggcaagaaatacaagcagtgccacggccgcctgcagtaatgccggccgcggttaaccgataacacccaggggttcagcttgctgagcccctgttttttggcacccatcaggagggtgagatgaaacatctgaatatcgccgtgggcattatccgcaatgctcaacaggagatctttattacccgccgcgccgccgatgcgcacatggccggcttttgggagtttcccggcggtaagatcgaacagggtgaaacgccggaacaggcgttgagccgcgagctgcgggaagagaccggtatcgaaaccgaacgcgccgaactgctggaggtggtggagcaccgcttcagcgatcgcatcgtgacgctgaatttttatctggtagaagcctgggcgggtgagccgttcggccgcgaggggcaaccgatgcgctgggtaaaacaggtggacctgcgtgaagacgagttcccggaagccaacgtcggcattattcagctgctggtggcacaggcgaacgccgcgcaataaccagtttggcctggcgtccgccaggccaacagcgggcgatcagcgatcgtccatttcgctccagtcttcgctttccgacagatcgctgttgctcggaatgcgcttctcttcatcggcccactcgccgagatcgatcagctggcagcgtttgctgcaaaacggcctgaatgggctgacttcaccccaaaccacgccggtgccacaggttgggcattttactacggtcgtcataacggttccttatgccttctgacagtactgagaaggctttctttcataagttcaacaacaggccagttcgaacgtcaggcgttcaggcaccgcgccatgttcgctgtccagcggcaggaaacgaatggcataacgcgtcttatggccggaaatctgcggataaagctgcggcgccagatggaggcgcaggcgcagcagatccgccccttcggcgttgtcctggaaaaaaccgttcaggctgatttgattgcggaacggcccggattggcggatcagatccaacaccatgatcagtgcctggttcagcggatccagcgactgcagccaggcggcgacgtcggcatcgcgatcttgctgcggcgcgtgcatccacatgtgcagggtcggcagatcgaagctgcagcaaccgccaggaatgttcagccgctgacgcaccaggccgatcagccgatcttcgcgcagcgcctggccgaggcgcggcgccgccatcagcgccgatgagcgcgacttcagctggccgcgcagctggtcgatcagcgccatatccacgcccggcacatcggcccaggccaacagtttctgctgctggcgctccagctctttgagcagttcggtgcgcacttcgccgcgctccagcacgtccagcaagtcggaaacggtgcgaaagaaggtgagggcgatggcggtttcactcagggcgcgttggccgtgcagctgttgcagcaggaattcgatgcgcagccaggtgcgcatcttctcgttcagcgggtgttcaaagagaacggttggggaaacatcactcatgcagtttaatcctgttggggcgctgttgccgccagttcaaggtagcgacgatgcagagcggcgacctgtggctctatcccctgagcggcgccgctgttgtcaataatgtcatccgccacggcgaggcgctgctggcgcgtggcctgggcggcgagaatgctctgcgcttgctcacggcttacgccgtcgcgcgcgatggtgcgagccagctgggtttcggcgtcgacgtcgatcaccagcacccgatcggcgcgatcctgcaggcggttttccaccagcagcggcaccacccacagcgcgtacgggctggtggcctgcgccagttggcgctgggtttctcggtgtatcagcgggtgcagcagctggttcagccaggttttgtcatcgggatggctgaagatgcgctgacgcagcgcagcgcgatccaacgcaccgtccggcagcaacatttcattaccaaatcgttcggcgatcgcggccaaggcaggggtgcccggctcgacgacctgacgggcgatcacgtcggcatcgacaagggttgcgccgtggcgcgcaaaggcgttcgcgacggtcgtcttgccgctgcctatgcccccggtcaacgcaacaatgtaggccatggtgttaggtgcatccgatgttcataaaaaaataatagtcgaatcataaagcgatcgcgcagaagtgcaagtcggcaggcggcgcttgcgcatcggcaccgattgggtggcgagaaaaaacgcagcggcacggcaaaaatgagcgggcaatcacactgcgattatgcaggtaaatttgtcggattgtagcgtaaataaaggcgaattcgcagtcttgttcggcgattattagcgagtattataacgtcactggaactggcattaatctcgccgccgtctttttgcgccactggaaagccgtcgggtagaggttcgaatatcctccttgcgatccgtcgccattaaccaggaaatcataagtcatgcgtattgaagaagatttgaagttgggctttaaagacgtgttgatccgccctaagcgttccacgctgaaaagccgctccgaggttgaactggaacgtcagtttaccttcaagcattcaggttgcagctggtccggcgtgccgattatcgcagccaacatggacacggtgggcaccttccgcatggccgaggccctggcttctttcgacgttctcaccgccgtacacaaacattacagcgtcgagcaatgggctgacttcgtgcagcgcatgccggaatcggtgctgcgccatgtgatggtgtccaccggcacctccgaagccgacttcgccaaaatgcagcaaatcctggcgctgtctccggcgctgaaattcatctgtatcgacgtggccaacggctattcagagcattttgtcgccttcctgcaaaaagcgcgcgaagcctgcccgaaccacgtcatctgcgcaggcaacgtggtaaccggcgagatggtggaagagttgatcctctccggcgccgacatcgttaaagtcggcatcggcccggggtcggtatgcaccacccgcgtgaagaccggcgtgggctatccgcagctgtcggcggtgatcgaatgcgccgacgcggcccatgggctgggcggccaaatcgtcagcgacggcggctgctcggtgccgggcgatgtcgccaaagccttcggcggcggtgcggacttcgtgatgctgggcggcatgctggccggccacgacgagtgcgaaggcaccgtggtggaagagaacggcgagaagttcatgctgttctacggcatgagctctgaatcggcgatgaagcgccacgtcggcggcgtagcagagtatcgcgcggccgaaggcaaaaccgtcaagctgccgctgcgcggcgaggtggagtttaccgtgcgtgatatcctcggcggcttgcgttccgcctgcacctacgtcggcgccgagcgtctgaaagagctgaccaagcgcaccacctttatccgtgtggcggagcaggaaaaccgcgtcttcggcagcaaataagccgcagcttgcattcgggcgccgcgcaccgcggtgcccgctatcctcttctttatcccagcacgctgcccagttgaaagataggcagatacatggcgatcaccaaagcgccgacaatcccgcccaccaccagcatcaacagcggctccagcgtttgcgccagcgtatcggccagctcgtgcgtctgccgttcataccactgcgccaacttatccagcaaggcgtccagcgaaccggactcctcgcccacccgcaccagctgccggcacagtggcggaaacagcggttgcaaacccagggcctgatgaaacgcttcgccttcggcgatctgccgttgcacctgctccagcgcctgccggtacagcggatgatccgccgccagcgccgccgcgttcaagccttccaccagcgtcagccccgcgcgttgggtcatggtcaggatacgaaatgtttggctcagcgcgccgccgctcaccagccgggcaatcagcggcaggcgcagcaaggcggcctgttcgcgttggcgccacggagggcgcggatgcagccagcggcagtagccgaacagcaacgcgccgagcagcagcgccaaataggggcctacggcgatcagcagcgcggacaaccccaataatccttgggtaaaccagggcagctgcgcatcgaacgactgataaaccttggcaaattccggcagcaccatcaccagcatcagcacgctgaccagcagcgccaccgcgcagatgaagaggggataacgcagcgctttggtcaccttgcggcgcagcagcaactgggcctcctgttgttgcgccaactgcaggcagcagcgatcgaggttgccggtcagttcgccgatggcgatcagttggcgatagatcagtggaaaaacgcttggttgtgcggcaaggctttcggagagcggctgcccttcgcgcacctggtcggccagctggcgcagcaggcagcgccaggctgccgaaggatgctctgctgccagcaactgcagcgtattgaccagcggcagcccggcctgcaacagggtagcgagctggcgggtgaagtggattaagggttctccgcgccattggccgggcgtgacgcgtttgccgtgcccgatccgccaaggttgcaggccttgttcgatcagcagccggctcacctgccgtttttcctcgctcatcagttcgccgcggcgtaaggtgccctgagcgtcgaaagcttgccacagaaacaaccggcgcgctttcatggcgtggttacgccgagttggacgacgtcgatcacgcggtacagttcttccagcgaggtcgtgccttcggcggccagcgccagacccgcctgcagcagcgaaagctgcccctgttcgcgggcgatatccgccagcagactgggagcggcgttcgccagcaatgccgcctgaatttccggcgtaatggccaacagttcatacacgccgatgcgcccataatagccgccgaagcagtgctcgcagccgtcggcgcgccaggcggtcagcggttccggccagagcgcggtgggaaaatgcgccggctggctttgcgggtagcggcagtggcgacacagcctgcgcaccagccgctgggcgacgaccagcttcaggcagccggcgagcaggtagccggggatacccatgtgcatcagccgcgtcagggtttcagccgtggagttggtatgcagcgtcgacagcaccaggtggccggtttgcgcggccttgaccgcgatctcggcggtttccgcatcgcggatctcgccgatcatgatgacgtccggatcctggcgcagcagggcacgcagcactcgggtgaagttcagctcggttttggcgttgatctgggtctgattgacgccgaacagcgggatctcgaccggatcctcgacgctgcacaggttgctttgcgcatcattcaactggcgcagcccgctgtacaacgttaccgtcttgccgctgccggtcgggccggtcaccaggatcaaaccttgcgggcaggccaacgctgccgcgtagcgcgccagatccgtccggctcatgcccagttgatccagcggtagctcttgctgctcgccctgctgaacgcgcagcaccaccttttcgccgtgcaacgtcggcagggtggcgatgcgcatggcatagcgcgcgctgtccagcgtcaggctgagctgcccgtcctgaggttgacggcgctcggcgatatccagttggccgaggatcttcagccgggcgatgaggcgcgcagccagctgcggcggcggtgaggcaagggtttgcagcacgccgtcgatgcgcaggcgaatgcgaaaatgctgccgaaagggctcaaagtgaatgtccgaggcgcggcgctgaatggccaggcgcagcgtctggttgatgaactgtaccaccggcgcatcgccgtcgtcggggtaggcgatgtcggtcgtgtcctcttcggccgtcaacggcgccgggagcggctcgtggtgctggttcagcgccatctccagcctggccgccggccattgttccaaatggatgcgcttgccggtggcgaaacgcagcgccgccagcagcccctgcggcgcttcttcgctgagcgcgaccgtcagggtggtcgggtcttcgctcagcgccagcgcctgatagcgccggcacagggcgtgaacctcttcgctgatttgcgcgttcatcgccattactccgccgcgttgtcgaagcggaagacttcctggcacacctcaaccagcgtcgcgttttcgctgctgcacagccgggtccagcgggtcagcccatcggcgttcgacttgggggttaatgccaccgccaggccctgtagcgtttggctgccggtcagcgtgatcacgcctttgacgactttcaccccgctgacatagcgcgacgtgccgccggtgggaatgcctttgctgccggactcgcagccggcgggcgcgccttcgtccagcacgcacagctcgaccgccattttatacggcgccatggtttgcagcatgtcggtcatcgccgctttctggatgtagcgctggtaggcgggaatgccgatggcgctgaggatggcgatgatggcgatcaccaccatcagttcgatcaggctaaagccgcgttgtgtttccatgcgttgtttcctccataacggtgtggaaaacaacggtagcggtttgcgcgggggaacggcgagcaggttttacgcgtttctcggcgtacttccatcagtattgatgtcgtttgcagcggagggaaaaacggtgcgaggggcttcgcaaactgcggtaacgcccccggcagcggccggggacgaggggatcatttgaagcgcatcgacagatcgagcgcggtcacatgcttggtcagcgcgccgaccgaaatgtaatccacgccggtttcggcgaaggtgcgcagcgtctcgcgggtgacattgccggacacttccagctgggcgcgaccctgggtttgggcgaccgcctgacgcatcatctctacgctgaagttgtccagcatgatgatatcggcgccggcatccagcgcctgctgcagttcatcgagcgactcgacttccacttccaccggcacgtcggcgtgcagccagaaggctttttccaccgcgttcttgatcgagccggaggcgataatgtggttttccttgatcaggaaggcatcggacagccccagccggtggttgctgccgcccccgcacagcacggcgtatttcagcgcggtgcgcaggccgggtaaggtcttgcgggtatcgagcaggcgagtccgggtgccttccagcagggccacatagcggctgacctcggtcgccacgccggaaagcgtctgcacgaagttcagcgcggtgcgctcgccggtcagcatcacccgcgccgggccgcgcagccggcagagcggttggttcggcgtcagacggtcgccgtccgccaccagccactccacctgcacctgattgcccaactgaataaagacttcgttcagccagcgacggccacagaacacgccggcttcgcgggtgatgacggtggcttcggcctgtttgtctgccggtaacaattgcgcggtaatatcgcgcccggcgtcgacttcgccccccaggtcttcgcgcagcgcctgggcgacggcatagggaatatcactttcaattcgttcaagaagctcggtgcggcgactgtcggcactgtagcggcgtgtcggcatggaaaactccgaaatggacggttagatcgtaggggaacatgctactctgttgcaggaataagtaccaccgcagagaggtgtctgatgcagttggaaaatggctggattgttggggtgacgcgagtgctctcgccgcactgcgatcggcgcccggatgacgagccgccctcgctgctggtcatccacaacatcagcttgccgcccggcgagttcggtggcccctatatcgaccagctgttcaccggcacgctcgaccctgcgcagcacccttatttcgccgagatccatcagctgcgggtgtcggcgcattgcctgattcgccgcggcggagagatggtgcagtatgtgcctttcgaccagcgtgcctggcacgcgggcgtttccctgtatcagggacgtgagcggtgcaacgatttctccatcggcatcgagctggaaggcactgaccagttaccctacaccgaagcgcaatatcgcacgctgcaggcggtcaccgtgctgctggccgaacgttatccgccgctggcggccaatatcgccgggcattgcgatatcgcccccggccgcaagaccgatcccgggccggcgttcgattgggatcgctatctggcatctctggaacaacgcggcgcgcccgccgacgctatgcttgagacaagaaaaagggagaggaatcgctaatgacgctgtttacgctgttgctggttttggcctgggagcgcctgttcaagctgggagaacactggcagctggatcatcgcctcgaagtggtatttcagcggctgcatcgggtttcgctggcacagacgctggcgatgaccgccgcctggatggtgatcgtctggggcgttctgtggttgtcgcacgggctgttcttcggcgtggtgacgctgctgctgtggatcgtcatcgatctgctgtgcgtcggcgccggcatcaagcgcaaacactaccgcgcctacctgaaagcggcgcggcagggggatatccacgccagcgatcagatggcggaagagctggcgttgatccacggcttgccggtggactgcagcgaagagctgcgcctgcgcgagctgcaaaacgcgctgctgtggattaacttccgttattacctggcgccgctgttctggtttgtggtctttgggccgtacgggccgatcgcgctggcggggtatgcctttctgcgcgcctatcaaacctggctggcgcgccacaatacgccgctggagcgttcgcaatcgggcatcgatcacctgctgaactggctggactggatcccggtgcgtttggctggagtggcctacgcgctgtttggccacggtgaacgcgcgttgccggcctggttcgcctcgctcggggatcggcattcgtcgtcgtatcaggtgctgacgcggttggcccagttctcgctggcgcgcgatccgcatatggatccggtgcaaacgccgcgggcggcggtgacgctggcgcgcaaggtgacgatgatcatcgtggtggtggtggcgctgttgaccatttacggcacgctgctttaagccgcagagaaaaaaaacgggcgccgaggcgcccgttttttttttggccattcggccgggattacagcttggcgaagcagcgacgcgcggcgtcgatggtgcgctggatgtcttccttgctgtgcgccacggacatgaagcccgcttcgaaggcggacggcgccagatacaccccttcttccagcatcaggtggaagaagcgcttgaagcgttccacgtcgcactgcatcacgtcctggtagcaggtgaccgccggcgcgtcggtgaagaacaggccgaacatgccgccgacgttgttgaccaccagcggaatattctcctcctgcgccgcatgcagtaggcctgcggccagcatctcggtcagttcggtcagcgtctggtgcacgccgacctgtgagacttcggtcaaacaagcgtagcccgccgccatggcgatcgggttgccggacagggtgccggcctggtagaccgggccggtcggcgccagcgcgtccattacttcgcgacggccgccgaaggcgcccaccggcatgccgccgccgatgattttgccgaggcaggtcagatccggctcaacgccgtaataggattgcgcgccggccagcgcgacgcggaagccggtcatcacttcgtcgatgatcaagagcgcgccgtacttgtcgcacagggcgcgcaggcccggcaggaattccggcagcggcggcacgcagttcatgttgccggcgaccggctcgacgatgatacaggcgatttcggacgggtactgttcgaaggcggcgcgcaccgaatccagatcgttataggtgcaggtcagagtgtgcttggcgaagtcggccggcacgcccggtgagttcggctggccgagggtcagcgcgccggagccggctttcaccagcaggcagtcggcgtggccgtgatagcagccttcgaacttgatgattttatcgcggttggtgtagccgcgcgccaggcggatggcgctcatggtggcttcggtgcccgagttcaccatgcgcaccatatccatcgtcggcaccagctcagtgaccagctgcgccattttgacttccatctcggtcggcgcgccgaagctcaggccgcgctgcgccgcttcgattaccgcgtcgcggatcgccgggtggttatgccccagcaccatcggcccccaggaaccgacatagtcgatataggccttgccgtcggcatcgaacaggtaagccccgtctgcccgctcgataaacagcggcacaccgcccacgccggtgaatgcacgcaccggagagtttaccccgccggggatcaactgttgcgcctgggcgtacagactttcggacttgctgtgtaggctcataaatcggctcctggattctcttttgaatgatttgaccgcgctattctagaggagagcgccgcgttatgaaacgatcacagtcagataccattaacggcagcgtccgccgccaggttggggtagaattatcgctctgcctatttgtattacaaattacctgacgaatcactcgcgatgacagaatcacaatcacagcccgtcgggacgttgagcccgcgtctgcgccgcagcgatgcggtgcgtcagtttattcgccgcgataaaaccccggttgcgatcctgatgatggccgcgctggtgggggcgctggccggtttgctcggcgtggccttcgataaagcggtggagtgggtgcagcagcagcggctggcttcgctggcgcaggtcgccgactcctggcttctggtgtggcccctggcgtttatcctgtccgccgcgctggcggcgctgggctattacctggtgcggcgctttgcgcctgaggcgggcggctcgggcattccggaaatcgaaggcgcgctggaagagctgcggccggtacgctggtggcgcgtgatcccggtgaaattcatcggcggcatgggcacgctgggggcgggcatggtgctggggcgtgaagggcccacggtgcagatgggcggcaacgtcgggcgcatggtattggacgtgctgcgcattcgcggcgccgaggcgcgtcatacgctgctggcgaccggggccgccgccgggttgtccgccgcgttcaacgcgccgctggccggcatcttgttcatcatcgaagagatgcggccgcagttccgctacaacctgatctcgattaaagcggtgtttatcggcgtgatcatgtcgagcgtggtgttccagctgtttaacggccagggggcggtgatcgcggtcgacaaactttcttcggcgcccatcaataccctgtggctctatctggtgttgggggcgatcttcggcgcggtgggcgtggggttcaacgcgctgatcttccgcacccaggacatgttcgcgcgcctgcacggcggcagaatgcgcaatgtcttgctgatgggcgggctgctcggcggcgtgtgcggcattctggggctgatccagccggaggcagcgggcggcggctttgggctgatcccgatcgccgcggcgggcaactacagcgtcggcatgttgatgtttatctttatcacccgcatcttcaccacgctgctgtgcttcggttccggcgcgccgggcggcatcttcgcgccgatgctggcgttgggcacgctgttcggcaccgccttcgggctggcgggggcgcatctgttcccgcagtacggcattgaggcgggcaccttcgccatcgccggcatgggggcgctgttcgccgccacggtgcgcgccccgctgaccggcatcgtgctggtgctggaaatgaccgacaactaccaacttattttaccgatgatcatcacctgcctcggcgccacggtggtggcgcagctgctcggcggcaagccgctgtattcgtcgatcctggcccgcacgctgcaaaagcaggaggcgcagctggcgcgggaggcggcgcagaaaacaagtaaggaaaatacaacaaatgcggtgaatacttgaacgcaacactcaggtatcggataatcgttaatattaatcaggcagccatagtcgcgatctgatgctgaacaatgttgggagtaaagagtatgagtgatcaaacggcactgcccctgcaatttaccgaggcagcagcaaacaaggttaagttcctgattgctgacgaagaaaacccgaacctgaagttgcgggtttatattaccggcggcggctgcagcggattccagtacggcttcacttttgacgacaaggtcaacgatggcgatatgaccatcgagaagcagggcgtggcgctggtggtcgatccgatgagcctgcagtacctggtcggcggttcggtggactacaccgaagggctggaaggatcgcgctttgtggtgaccaacccgaatgccaaaaccacctgcggttgcggttcgtcgttcagcatctgagtttgcctgccagaatatcaacccgctcgccttacggccggcgggtttttttatgcctatccttccacgaggatcactgccgtgccgttctcctgcgccggccggccggccgtgagtgatgtgcggcggctcagcgttcgagaataaaggcgggcagcttgagatgccaacgaatggccgccagccgaatggccagggtaatgagcatgcccagcatcatggcctgttgcagcggcatattgaaggtgtaaaacgccgtggcgtgcacgatgccgccgatgatgcaggcggtggcgtaaatttcggtgcgcaggatcatcgggatctcgcgcgccagcacgtcgcggataatgccgccgccgacgccggtgattacccccatgcagatcgccaccagcgggccggtgccggccgcgaaggccttgttgacgccgatgccgacgaacaccgccagcccgacggcgtcgagcaccggaagcacccacttcggcaggcggcgcggctggcgcaccagcagcagcgtcaagacgcaggtgatcatcgccaccaccagatcggtgggatccttgacccagaataccgggccgttggccagcgccatgtcgcggatggtgccgccgccgaccgcggtgaccacgcccaataccagcacgccgaacggatccatgcgcaacttgccggccagcagcacgccggagacggcgaacaccgccgtgccgagaatatccagccagaacaccagcatcagcggatctccgccagctggcggcacagctgctgcgccgccaacagtaggcgcggcccgccgcgattgaaccagtcttcgttcagcgcgatcaccggcacctgcagctgcggcgcccagaaggctttcacattggcggcctctttcgcgccgccggtgatgacgatggcctgcggctgacgcgccagtacctgctcgcggctgatctgtggccaaggggtgcggctgtcggcgaagacgttctgcccgccgcacagcgccagcacctggctttgcagcgtggcgccggagctggtgaacagcggctgggtgccgaactgcagcaacacgcggcgtggcacgttagtggcgtactgttgcctgagagcggcgaactggcggcgaaggccttctgcggcctgatgcgcctggtccgggtgcgggctgtagcgcgccagcttgtccagcaagccggcgatcccttcgagattgtcggcgtccgcatagaagatcgggatgccgaacgcggcgagctgatccaacgcgcgttgcggattgccgccgcgccaggcgaggatcagatccggcttgagcgccagcacccgctccagattgatgccctgccaggaggccacctgctccagcctggcggcctgcggcgggtaatcggaataggcgctcgccgccaccagcacatcgcccatgccggcggcataggcgagttcggtggcgttgggcgccaggctgatcacccgctgcgcggcgccggccggcagagccagccagagcgccaacaggcagaacatcgaggtgaagcgcagtctcacatcaaccgcgcttggccagggtttgcagcatggcgttgaccatcagcgtggactgcttggccgctaccaccaggaactcgtcaaagctcatgtgcgattcgctgtcggcgacgtcggaaatggcgcgcaccaccacgaacggcgtgccgaacagatggcagacgtgggcgatcgccgcggcttccatttccacggcggcgacgctcgggaaggtggcgcggatgcgcgccagcggttcggcgccgttgatgaaggcgtcaccgctgcagatcaggccgcgcaccgcgtgcagatccagctgtttgatgcagctttccgccagcgcgatcagcgcgtcgtcggcgacgaacgccgccgggcagccggccatctggcccggctcgtagccgaaggcggtgacgtcggcgtcgtggtagcgcacttcttccgacaccacgatatcgcccacgcgcagcgtgctggccaggccgccggcggagccggtattgatcaccacgtccgggctgcagtgctccagcaacagggtggtgcccatggccgcagagactttgccgatgccggatttcagcagggccacgtcaacgccgccgatctggccggtgtagatttcgcagcccgcgcgctggatggtttgacggttttcgatttgatcgcgcagcagggtgacttcctgctccattgcgccgatgatgcctactttcataaataacactcgctgattggccgtgagaattgcggcatagtctatcatggctgtgtaagagagataatgcgttgcatccgccgccgggaattgttatcacgggggcagggcgcaacggcggagaaacagatgtctgggatcgacttcaagcaaaaaatcagcttccaacggcctttcagcaaaccgatcgaggccgaggaagagtacgacatcgtgcggcagttcgagagcgatcgcgggcgcatcgtcaactcggccgccattcgccgtttgcagcaaaaaacccaggtgtttcctctggagcgcaacgcggcggtgcgcagccgcctgacgcactcgatggaggtgcagcaggtcgggcgccatattgccaaagagatcctcaaccgcttcaaacaggcggggaagatcgacgaactcggcctgacccggctgctcgatccgtttgagagcatcgtggaaatggcctgtctgatgcacgatatcggcaatccgccgttcggtcacttcggcgagtcggcgatcaatgactggtttgcccagcggctcgatcccaccagctgcggcagcgagccgggcagtcacgatcgctgccaggtcgcggcgctgcgcctgcatgaaggggagagcgatctgaaccggctgcgcagccggatccgtcaggatctcagccacttcgagggcaacgcccaggcgatccgcatggtgtatagcctgctgaaactcaatctgacctacgcgcaggtcggctgcattttgaaatacacccgcccggcttattgggcgggcgacatccccgccagccacagctatttgatgaaaaagcccggctactatctggcggaagaggccttcgtcgatcggctgcggcgtgagctgcatatgggcgagttcgatcgtttcccgctgacctacattatggaggccgccgatgatatctcttactgcgtggccgatctggaagacgcggtggagaagagcattttcaccgtcgagcagctgtatcagcacctgattcaggagtggggcgaggtggcgccgggcgatctgttcgacaagaccgtcgccagcgcgtttcgcaagatcgatcgcggtggcgcgcggcgcagcgcggaagatcagttcttcatgtatctgcgggtgtttaccgtggcgcggctggtgccgcacgcggcgcagcgctttatcgacaatctggacgcggtttatcagggcagctttaatcaggcgctgctggaggattccagcccggcctaccggctgctgaaaatatttaaaaatgtggcgttcaagcatgtgttcaaccacccggaggtcgaacagctcgagctgcaaggctaccgggtgatcagcggcctgctggacatttacagcccgctgttggcgatgtcgctggcggacttcagcctgctggtgcgtgaggacagccaccgcgcttacccgatcgaaacgcgcctgttccacaagctgtccaccaagcatcggctggcgtatgcggaggcggtagaagggctgcagcatttatcgccggagcagcaagccattcgggaatattatttccgcgcgcgtttattgcaggactatatcagcggaatgaccgacctttatgcctatgatgaatatcgtcgattaatggcggcggaataattaagctgaggaataattataagcaattccaaccggttggctgtcttgatttttgtaaagacggacaatatttgtttactattgccaatcatctgtgccggaacttcaggctattaattaactctgaataagcacgcaagacggccattcttttttgaacgactttataagagacacacagatgaaaaaaaccgcattagttctgagcgcattggcattcagcatcggcatggcgatgggcccggtgacggccagcgccgctgaaaccgcctcttccagcacccagcagttgccgagcctggcgccgatgctggaaaaggtaatgccttccgtggtgagcattaacgttgagggcagcaccacggtcaatacgccgcgcatgccgcagcagttccaacagttcttcggtgaagattcgccgttctgtcaggacggttcgccgttccagggctcgccgatgtgtcagggcggtgaacagcctgggccggatggccagccgcagggcacgcagcagaaattccaggcgctgggcgccggggtggtcatcgatgccgccaagggctatgtggtgaccaataaccacgtggtggataacgccaacaagatccaggtgcagctgagcgacggccgccgtttcgacgccaaggtgatcggcaaggatccgcgttccgacatcgccctgatccagctgaaagacttcaagaatctgacggcgatcaagatggcggattccgatcagttgcgcgtcggcgattacaccgtagcgatcggcaacccctacgggctgggcgaaaccgccacctcgggcatcgtttccgccctggggcgcagcggcctgaatatcgaaaactacgaaaactttatccagaccgatgcggcgatcaaccgcggcaactccggcggcgcgctggttaacctgaacggcgagctgatcggcatcaacaccgcgatcctggcgccggacggcggcaacatcggcatcggcttcgccattccgagcaacatggtgaaaaacctgacggcgcaaatggtcgagtatggccaagtgaaacgcggcgagctcggcatcatgggcaccgagcttaactctgagctggccaaggcgatgaaggtcgacgcgcagcgcggcgctttcgtcagccaggtggtgccgaagtcttccgccgcgaaggcgggcatcaaagccggtgacgtgatcgtcaccatgaacggcaaggccatctccagcttcgcctcgttccgggcggagatcggcacgctgccggtcggcagcaagatgtcgctgggcattatccgcgacggcaaaccggtgaccattgacgtcacgctggagcaaagcgcgcagacccaggtggcctcgggcaatatctacaccggcattgaaggcgccgagctgagcaatgcccaggtcggcaaccagaaaggcgtcaaggtcgacagcgtgaaagccggcagcgccgccgcgcgcatcggcctgaaaaagggcgacgtgatcctgggcgtgaaccaacagccgatccagaacctgggcgagttgcgtaaaatcctcgacagcaagccgtcggtgctggcgttgaatattcagcgcggcgatagccagctgtacctgctggcgcagtgataaacgtcaggcgctaaaagcaacaaaggcacgctatggcgtgcctttttgcattatggcctgaggattcaggccggttgcgccagatgcacgcgcgccgcgtggatcaccagttcaatctcatccaacagctccagccactccggctccagttcgtcgttggtgatgccctggcgcagctgccgctcgaggtagaaacacagctgcttgaggcgcggcacgccgctgtagctgcagctgccgtgcagcttatggaccaggtcgaggatctcgtcgtcgtgttgcccttcgagcagcgcctgcactcgttcgcgcacctgcggcaggaaatcgagcagcatttgcagcagatcgcgcgccagatccggcttattggccgcctgacgcagcgccagcggccagtcgagcgacagcggcgcgtcgtcggcgacggcgttttccatttcgccactgtgatagcgcgacagcacgcgggtcagcattttctcgtcgatcggcttggccaggtagtcgtccatcccggcctgcagcaggtgctcgcgctcgccgctggctgcatgggcggtgacggcgacgatcggcgtggagttgtggtgcggcaactggcggatcagttcgctggcgtgaatgccgtccatcttcggcatttgaatgtccatcaggatcagatccagcacgttgttgcgcgccagcgccagcgcttcctcaccgctctcgcacagcagcgttttttccacctgttcgcccagcagcgtgccgatcagcttcaggttggccgggttgtcgtcgaccgccatcaccgtcagcggcagacgtttacgctcaggcggggcggcgagccgatcgggcgtctccattctcagcagagggaacagacgcgtgctggtgatcggcttgatcaggcagccgagcgcgccttgttgtttaagcagctcggcatcgatctgcgcctggcacggcagcgccagaatgaccctatcggccagcttcagcgaggccagcaatttgtcctgatgctgcgccatgttgtcgcggaacgggatcggcacgccggccagcaggaagtcatagtggcttggcggcaactggcccagcgtcggcgagtgggtgatcaccagctgcgtgacgctgagcatgttgagcgtcgcctgcgccgccgtcgggttagactcgatataggccagcgttttgccgttcagatccggcagactcggcgccagcgacagcatgccctcgttcagatccagcgtgatatggaaccagaaggtcgagccgcggttcaactggctgtggaagcagatatcgccccccatctctttcaccagcttttgtgtgatcaccagccccagcccggtgccgccgtggcggcgggagatgctggcgtccgcctggcggaatgcctggaacagctgcgactgctggcgttcggagatgccgatgccggtatcgtggatctgcacttccacttccacccggcgatccagctgtttgcgcagctcgacgcgaatgtcgatattgccggtttcggtgaatttgatggcgttgcccagcaggttggtgatgatttgctgcaggcgcagcgagtcgccgatcacctgctccggcacgtcgttgtgcacatccagcgtcagctccaggcccttgtcgtgggcgctgggcgccagcagcaccaccacttcgtccagcgtttcacgcagggcgaacggaatatgctccagcaccagcttgccggcctccagcttggaaaagtccagcacgtcattgatgatggtcagcaggttgttggccgagcgctcgatggtctgcaaatagtcggtctgggttgcgctcagatcggttttcagcatctggcgggtgaagccgatcacgccgttgagcggagtacgcagctcatgcgacatgttggccagaaattcggacttgatgcgcgccgcctcctgcgcacgttttttcgccagatccagttcgacgttctggatctccatctgctccagcgtttcgcgcaggtctgacgtggcctgatcgatgttctgctgcatctcttcgtgataggcggtgagcgacatcgccatcgagttgatgccgtttttcagcatgtgcagctcgccgagcatgtagccttccacgcggctgtcgagctggccgcggcggatgcggtcgacggtgttcaccatattgcggatcgggccggtcacgtcgcgcatcagccggtaagcgaacaggatggcgatacacatgcacagcagcaacagcagggtagagacaaagacctctttatattgctgcagccgcaccgactgcagatccagctcgatcgccacatagcccaggttgttgtcgggatggctgccgccgtcggcggtttcatccggatactggctttccgacaggatcggcgtgcgcaggatcagcgaatcgccgcgtcgggtgagcatcagatcggtgggcaacggcacgcctttcggcagctgcagctgagcgaagttgtgatgataattggaggtgacgaacaaattgttctgcgcatcgaacacggtgatcgaacgcacgatgtccgaatggcggcggtgcaacaggctgaccaactgcctgaccgattcgcggctgcggaacgtcatgccgtactcgctggccaccgccagcggctcgatgatgctggcgccggcgtcgaccagttgttcctgcagctcgttatagcggtgcaccacgaagaaggtgctgagcagcaaaccaatcagcaaggtcggtgccagaatcaggatcatcatgcgcgcacgcaggctgtatttggtcatgggattccaatgtgggagaattgacagctgacactagcttaatgaaccagcacacaatcgacaaatatggcgcaattctactctcccaaacgccgcgtgacgacccggcagagctcacaaatcttcaccgtgacggtgagcgatctcgatcctttcggccagggcgtggcgcgccacgacggcaaagcggtgttcgtgccgggcgtcttgccgggcgagcaggcggaaatccagctgaccgaagacaagcgtcagttcgccaaaggcaagctcaaacgcctgctgagccgcagcccgcagcgggtagaaccgcgctgcccgcattttggcgtgtgcggcggctgccagcagcaacatgcggatgaggcgctgcaacagcagagcaaggcggcggcgctggtgcgcatgatcgcccgcgaaaccggagtaaccccgcaacaggaaccggtgatcgccggcccggaatacggctatcgccgccgcgcccgcctgagcctggcgtggcagccgaagcagcagcgcctgatgatgggctttcgccaggcggcctccagcgagctggtggcggtggagcactgcccggtgctgcggccggagctggagcagctgctggcgccggtgcgcgcctgcctgagcgggctgcaggcggtgcggcggctggggcatgtggagctggtgctggcggataacggcccgctgctggtgctgcgtcatctcgacgcgctgaaagaggcggatcggcaggcgctgttggcgtttggcgagcgggaaaaggtcgccgtttatctggcgccggacagcgaacgggtggaaaaactgtgcggtgaaacgccgtattatcaggttgacgggctacgcttagacttcagtccgcgcgactttattcaggtcaatgacgtcgtaaaccaacaaatggtggcgcaggcccttgaatggctcgacattcaacccaatgatcgggtgctggacctgttctgcggcatgggtaatttcaccctgccgctggcgcgccgcgccgccgcggtggtgggcatcgaaggtgttgccacgctggtagcgaatgggcaatataatgcacataagaataagctgaataatgcgtcgttcttccatgagaatctggaggacaacgttgcgcggcaaccttgggcagcacaagggtttgataaggtgatgctggatcccgcccgcgctggtgcggccggggtgatgtcacacattgtaaaactggcgccggcgcgggtggtgtatgtttcctgtaaccccaccacgctggctcgcgacagcaacgtgctgttgaacgccggttatcgtcttgcgcgcgtgcggatgttggatatgtttccgcacacggggcatcttgaatcaatggcgctgtttatcaacgagcgtgcgccagaggtcgctgcaaagtagggagaagttatggttgcggtaagaagtgcacatctgaatacggcgggtgagttcgctcttgatgagtggatcgccggcttggggctacctaacccgcagtcatgtgagcgattggccgcaacctggcgttattgtgagcagcagacccaaaaccatcctgacgcctcgctgctgctgtggcgcggcctggagatggtggaaattctctcgacgctgagcatggacaacgacagcatgcgcgccgcgctgctgttcccgctggtggacgccggcatcgtgcaggaagagaccctgaccgaagcgttcggcaagggcatcgtcgcgctggtgcacggcgtgcgtgacatggacgccattcgccaactgaaagccacccaaaacgactcgatggcctccgaacaggtcgacaacgtgcgccgcatgctgttggcgatggtggaggatttccgctgcgtggtcatcaagctggcggagcgcatcgcccacctgcgtgaggtgaaagacgcgccggaagacgaacgcgtgctggcggcgaaagagtgttccaacatctacgccccgctggccaaccggctcggcatcggccagctgaagtgggagctggaggatttctgcttccgctacctgcatccggaagaatataagcgcatcgccaagctgttgcatgagcgccgcatcgatcgcgaacagttcatcgacgatttcgtcgccgggctgcgcgccgagatggccaacgaaggcattcgggtggagatctacggccggccgaaacacatctacagcatctggcgcaagatgcagaaaaaacacctggcgttcgacgaactgttcgacgtgcgtgcggtgcgcatcgtggcggagcgcctgcaggattgctacgcggcgttgggcatcgtgcatacccacttccgccatttgccggatgagttcgacgactacgtcgctaacccgaaaccgaacggctaccagtcgatccacaccgtggtgctggggccgcgcggcaaaaccgtagagattcagatccgcacgcgccaaatgcacgaagacgctgaactgggcgtggccgcgcactggaagtacaaagagggcgcaggcgtgaccgtgcgctccggctacgaagaacgcatcgcctggctgcgcaagctgatcgcctggcaggaagaaatggcggactccggcgagatgctcgacgaagtgcgcagccaggtgttcgacgatcgggtctatgtatttaccccgaaaggcgacgtggtggatctgccggccggctccacgccgctcgatttcgcctaccacattcacagcgacgtcggtcaccgctgtatcggcgccaagatcggcggccgcatcgtgccgtttacctatcagctgaagatgggcgatcagattgagatcatcacccagaaacagccgaacccgagccgcgactggctgaacccaaacctggggtatgtcaccaccagccgcgggcgctcgaagatccacaactggttccgcaagcaggatcgcgacaagaacattctcgccggccgccagatgctggacaacgaactggaacacctcggcatcagcctgaaagaggccgaaaagctgctgatcccgcgctacaacatgaactcgctggacgaggtattggcggcgatcggcggcggggacattcgcctgaaccagatggtgaattacctgcagggcaagttcaacaagccgagcgccgaagaacaggatcgcgaggcgctgcgccagctggtgcagcagaaagcgccgccgccggcccgcaacaaggacaacggccgagtggtggtggagggcgtgggcaacctgatgcaccacattgcccgctgctgccagccgatcccgggcgacgacatcgtcggttttatcacccaggggcgcggcatctcgatccaccgtgcggactgcgatcagctggtcgatttgcaatcgcacgcgccggagcgcatcgtcgatgcggtatggggtgaaagctactccagcggttattcgctggtggtgcgcgtgatggccaacgatcgcagcgggttgctgcgcgacattaccaccattttggccaacgaaaaggtcaacgtgctgggggttgccagccgcagcgacaccaagaaacagttggccaccatcgacatggatatcgaaatctacaaccagcaggtgctgagccgggtgctggcgaagctgaaccagctgccggacgtgatagacgccaagcgtctgcacggcaactaagctcacatcgcctttcgggccgtatgcgctatcgatacggcccgaggtccatgcattcggtgggcgctcccatgcgcccccattctttctcagagattttttatgacccaatccactccgctgcagcgcctgctgaacatcatgaaaacgctgcgcgatccccaggtcggctgctcgtgggaccgcaagcaaactttcgccaccatcgcgccctacacgctggaagagacttacgaagtgctggacgccatcgagcggcaggactacgccgatctgcgcgacgaactgggcgatttgctgttccaggtggtgttctacgcccagatggggcaggaacaggggctgttcgatttcgatgaggtgtgcaccgccatcagcgataagctggagcgccgtcacccgcacattttcggtgacgccgaggggggggacagcgaagccgtggccgcgcgctgggagcagctcaaggccggcgagcgcgccgaaaaagcgctgcactcggtgctggacgacattccgcaggcgttgccggcgctgatgaaggcgcacaaaattcaaaaacgctgcgcctcggtcggcttcgactggaacaccctggggccggtgctggacaaagtgtacgaagagatcgatgaagtgatgcacgaagcccgccaggcggtggtcgatgagagcaagctggaagaggagatcggcgatctgctgttcgccacggtgaacctgtcgcgccatctggggcacaaggcggagaacgcgctgcaggcggcgaaccgcaagttcgagcgccgcttccgccaggtggaagcgatcgtccagcaacgcgggctgcggcttgaagacgccacgctggagcagatggaagacgcctggcagcaggtgaagaaatctgaaatctgatgcgcttccggcgttcatggcgccggggtgaacatgaaggacgttccacgcagacaagggaaggtggcgtcatgatcaagaggctaatgcttttagcctgttttttccccggtttcagcacggcgtctcctcctgctgatgttgggcggctgcggtatgatgaacgcaggctgccattagtcgatgtgcagatcgataaccggttacacacgttcatgctggataccggcagcgcagaagggatacacctttatcagcacgatctggagcgtctggtcgcgcaaccgagtctgaaggcggtgcagctggcgcctcggcggctgagagatctctctggcggtgaaaatcaggtgtctgcctggcggattagtcggctgtttattggcaatatcccgtttaacgacgtcgaagcggtgagttttaagccctggggactcagcctgggaaacgaggtgccggtaagtgaagtgatggggcttgggttgttccgcgatcgaaaggtgctgatggacttcgaaaacgaccgcttgcaaatgttgactcatctgccttcagacattgcaatatgggcttcatatccattcgaacagactgatgaggggctgagtgtgacggccttcgttggcaataaaccgttgcgcctgattgttgataccggcgccagccattctcttttgtttgccgcaggcttgccggctggcctcttgttttccggctgtcgctccattgagcctgaggccgataacctggattgccgagtgaccagattcaccttgaccgatcgccggggccggcatcacaacgatttggccatcgttaccgaaggcccaacgtctgaggcgctgggttttgatggtctgctggggatgggttttatgcggggtcatcgtgtgattgttgatatgcctgaacgcatgctctacatcagtcgttaacctgatgcgcctcgatcccaggtaatcgggtttagggaagctgaaccgccgctacaatgttgatcgacgacaaggttcacgaaagctgaaacggttaagcttgcagtcaggtcacaggcgcatggctgccgtcggcagcaaaaggccaacaaactgaaatctaaggcgttttatcgctcccgaggggcggtaaaaagaaattttctccgctaactctttgtatttcctggagggtttgcggggcgccggcggagtaaaccctgatgaacacgggagggcggccgagatgatggacagcaaaacgatcgtttgtaggtcaggagaggttcgggtatactactttcccgtcctggttcttccatcgtctttaaacctaaactctcaggttcagcatgacaactaattatatttttgtgaccggcggggtcgtatcctctctgggtaaaggcattgccgcagcctctctggcggctattcttgaagcccgtggcctcaacgttaccatcatgaaactggacccgtacatcaacgtggatccgggcaccatgagcccgattcagcatggggaagttttcgtcaccgaagacggcgcagaaaccgatctggatttgggtcactacgagcgcttcatccgcaccaaaatgtcgcgtcgcaacaacttcaccaccggccgcatctactccgacgtgctgcgtaaagaacgccgcggcgactatctgggcgcgaccgtgcaggtcattccgcacatcaccaacgcgatcaaagagcgcatcatcgaaggcggcgaaggccacgatgtggtgctggtggaaatcggcggcaccgtcggcgatatcgaatcgctgccgttcctcgaagccatccgtcagatggcggtggaagtgggccgcgagcacaccctgtacatgcacctgacgctggtgccgtacatggcggcggcgggcgaagtgaaaaccaagccgacccagcattccgtaaaagagctgctttccatcggtattcagcctgatgtgctgatttgccgttccgatcgcgcggttcctgctaacgaacgcgctaaaatcgcgcttttctgcaacgtgccggaaaaagcggttatctctctgaaagacgttgattctatttataaaatcccaggcctattgaaatctcagggactggacgattatatttgtaaacgattcagcctgaacgcgccggaagccaacctggccgaatgggaacaggtgatctacgaagaagccaatccgggcggcgaagtgaccatcggtatggtcggtaaatacgttgagctgccggacgcctacaagtcggtgattgaagcgctgaagcacggcgggctgaaaaaccgtctgaccgtgaacatcaagctgatcgactcgcaggacgtggaaacccgcggcgtggaagtgctgaaagggctggacgcgatcctgatcccgggcggctttggctatcgcggcgtggaaggcaaagtgatgaccgcacgctatgcgcgcgagaacaacattccttatctgggcatttgcctgggcatgcaggtggcgttgatggagttcgctcgcaacgtggcggggatggagaacgccaactccaccgagtttatgccagactgtaagtacccggtggtggcgttgatcaccgaatggcgcgacgaagacggcaacgtcgaagtgcgcagcgaagaaagcgatttgggcggcacgatgcgcgtaggtggccaacagtgcaacctgagcgacaacagcctggtgcgccagctgtacggcgaaccgaccattgtcgagcgtcatcgtcaccgttacgaagttaacaacatgctgttgaagcagatcgaagccgcagggctgcgtgtcgccggtcgttccgccgacaacaagctggttgagatcattgaactgccgaatcacccgtggtttgtagcctgtcagttccacccggaatttacgtctacgccgcgtgatgggcatccgctgttcgccggcttcgtgaaagccgctggcgagcatcagaagcgccaggtgaaataacatatttggtaggcggcgcgcggtgagaaccgcgcgctgtttgtctggagttttagtttaacttgtactgaggaaaacctaatgtccaaaatcgttaaagtcatcggtcgtgaaatcatcgactcccgcggtaacccgactgttgaagccgaagttcatctggaaggcggtttcgtcggcctggctgctgcgccgtcaggtgcttctaccggttcccgcgaagcgctggaactgcgtgacggtgacaagtctcgtttcctgggtaaaggcgtactgaaagccgttgctgcagtaaacggtccgattgctcaggcagtactgggtaaagatgccaaagaccaggcgaacatcgacaagatcatgatcgagctggacggcaccgaaaacaaatccaacttcggcgccaacgccattctggcggtttccctggcagcagcgaaagcggccgcagcctctaaaggcatgccgctgtacgagcacatcgctgaactgaacggcaccccaggcaaattctccatgccactgccgatgatgaacatcatcaacggcggcgagcacgctgacaacaacgtcgacattcaggaattcatgattcagccggttggcgcgaagaccctgaaagaagcggtgcgcatcggttctgaagtgttccaccacctggcgaaagttctgaaagccaaaggcatgaacaccgccgtgggcgacgaaggcggctatgcgccaaacctgggttccaacgccgaagcgctggcggttatcgctgaagcggtaaaagcggcgggctacgagctgggcaaagacgtcactctggcgatggactgcgcggcttccgaattctacaaagacggtaaatacgtgctggccggcgaaggtaacaaagccttcacttccgaagagttcactcacttcctggaagagctgaccaaacagtacccaatcgtgtctatcgaagacggcctggatgaatccgactgggcgggcttcgcttaccagaccaaagtactgggcgacaaaatccagctggttggcgacgatctgttcgtgaccaacaccaagatcctgaaagaaggcatcgagaaaggcatcgctaactccatcctgatcaagttcaaccagatcggttctctgaccgaaaccctggcagctatcaagatggcgaaagacgccggttacactgcggtgatctctcaccgttccggtgaaaccgaagacgcgaccatcgctgacctggcggtagggactgcggctggtcagatcaaaaccggttccatgagccgttctgaccgcgttgccaagtacaaccaactgatccgtatcgaagaagcgctgggtgaccgtgcgccgttcaacggcctgaaagaagttaaaggccagtaagttcgaccgattcggttgctaaataaaaacccgccgcggcgggtttttttatgttttaaattcgtgatgattgtcattttaataataagttttttattgaaagcgtggttttgtttaacccgataatttcattaaagatagtaaacgcgcttattttatattccaattttgtttgctttataactattcgttactagactgccaataaggcagtttatttctcgccgttctgccgtagaccttgaacatcaccataccttaatactgccggcttgctggccggttgagcgagggcttgatgcgacagcgaatcatcattgtcggcggcggaaccggcggcaccatattggccaatttattggccacaaaattgcaccgggaaattattaataataaagttgagttattaatgatatcggattcaccgctgcattattacaaaccggcgtttatgtatgtggcattcaatacttttttcaagcaggagctcacgcgttcacagcggagtttattgcggcctgaaatacagtttattattgataaagcggaatctttcgatttaaaacagcgaagtatagcgacgcaaagcggtaagctttactcctatgactttctggttttcgccaccggctgcgtaccttggccagagcgcatcgaagggttggcgcaggcgggcgatcatttctaccagtatcaggccgcgcggcagttggcgcataagctggcgacgatcgagaaaggccgcattttcatcaccgtgtccttccctgaaacgcccaacgtgccccatcagtgcggcatcgcgccgatcgaaaccaccctgatgctggacgactacctgcggcggcgcggcgtgcgcaaggcggtggagatcgtttatacctacccaaccatttctcaactgctgcgtaactgcctgtttttacagcgcccgaccggcgaagcgctgcccgccatttttgccgcacgtgacattctccaccagcgtgggtttaccctcagccgggtagacgcccaacgtaacatcgcctattccgctgagggggaagagcagccgttcgacattctgatggcaacgccgccgattcgtgcagtcgaggcggtgcgcaataccgggttgagcgagagtcaaaacggtgaaggctggctgccgaccgatcatcaaacgctgcaggtctacggccaacagggcgtgtatgtcataggcgataccgtggatttgccggtcagcaaggccggcggctcttgccataatcaggcgccggtcattgccgacaacatcgtggcggaaatgcggctgggccaaaccgtgagccattatgacggcaaggtgcaggcggtcgcgcaaatggggctgaatgccggcatgccgctggtgtacgactaccgtcacgacgtgctgccgacgcccgccaccaaggtgggcggcatgctgcgcaatgggtttaaccgcggcctttactgggccacggtaagggggctgatatgacggaaagcacggtgcatgcggctgacctgcaatcattggcggcgttgctcgagaaactgcagccgctgctggcgggtggccggttggataacgtggtcgatctgttgtcgctgttgtcggacgtggtggatattgccgacaacgcgctggtggagaaattagccggcgtctttgaaggtttggtgaccctcggctgggaaggcggaacggcgctgcagatggcgcacagcgagctgcagttgaatccaccaccggccagttttcgcgcgctgtacgccttgctgaagcagccggataccctgctggggttaacgttgctgctgcgtactttacaaatcatcggccggcgcacgcgagacagcgcgttgccgtcagccctgccagatgaatcgtcgaattaagcttcactcactcaggtaaggagttgtgttatgtccgctacagcagttggccacgactttgccacccgggctattcattacggctacgatcctcagcggtatcagggggcactgtctccgccggtgtttatgagctctacgtttgcttttcccacggcggaatacggcggcgcctgctttgccggcaccgagccggggtacttttactcgcgcatcgccaacccgacgttaaacctgctcgagcaacgcatcgccaacctggaggagggggaggcggcggtggcgttcgcttccggcatgggggcgatcaccgcgtgttgttggacgctgctcagaccgggtgatgagctgattgtcgacgaaaccgtctatggttgcaccttcagctactttcatcatggtctggcgcgctttggcgtcaagataacccacgttgatttgacccggccggagcggttggcggcggccattggaccgcgtacccgcctggtgtattgcgaaacgccggccaatcccaatatgcgtttgatcgatatcgccgccgtggcggagatcgcccatcggcatcaggcgctgttgctggtggacaacacctactgtacgccctatctgcagcggcctttggcgctaggcgccgatatcgtggtgcactcggcgaccaagtacctcggcgggcatggggatctcctggccgggatcgcggtgacgcgtcaggcgttggccgaggcgatccgtctggaggggctaaaggacatgaccggggcggtgctgtcggcgcaggatgccgcgctggtgctgcgcgggatgaaaaccctgccgctgcgcatggagcgtcattgcgataacgcgcagcgcctggcggagatgttggcggagcatccggcggtcgagcgggtatattaccccggcctggcgaacttcccgcagcatgcgttggcgcagcggcaaatggcgcgccccggcggcatgctggcgtttgagctgcggggcggcctgcgtgcaggcattcgcttcctcaacgcgctgcagctcatcttgcgcgcggtcagcctgggcgattgcgaaagcctggcgcagcacccggccagcatgacgcactcggcctacacgccggaagagcggaaacggcaccacatcagcgaggggctggtgaggttgtccgccgggctggaggcgtttgacgatctgcaggtggatatcctgcaggcattggcgcaggcgcaataaaaaacccgccgcagcgggttttagccgaagcgagcgttacatctgttgcgtcgctgtggtcaccggcgaaccgccgccttttttgcgtacccacagccagtaagccgcggtgaggaacgcgatccacaccagcccgacgtacagggcgatgcggctctcttcgaagtagccgagcaggccgatgacgaacgccataaaggcggtcgccaatgccggcgccaccggccaccacggcaccgggaagctcaactgacgcgtttcttccggcgacagcgtgcggcgcatgacgatctgcgacagcaggatcatcagccacacccagacggtggcgaaggtggcgattgaggcgatgatcatgaagaccttctccgggatcaggtagttgagcaccaccgccagtagcagggcgaccgacatcaccagcactgtcatccacggtacgccgctggcggtcagcttggtgaagctgcgcggcgcctggccgtcctgcgccatgccgtacatcatgcggccggcgccgaagatgtcgctgttgatggccgaaatggccgcggtgatcaccaccacgttcagcacgttggcggcggagctgatgccgaggttgctgaagatctcaacgaacgggctgccgttctggccgatgctgttccacggatagatcgccatcagcaccgtcagcgtcagcacgtaaaacagcaggatgcgcaccggtacggcgttgatcgccttcggcagcactttggcggggtctttcgcctcgctggcggtgatgccgatgatctcgatgccgccgaaggcgaacatcactaccgctaatgacgcgaccacgccgccgatgccgttaggcataaagccgccgtgctgccacaggttgctgatgccggtggcgtgctgggcttgcccgaaaccgaacagcattaccgccgcaccgccgacgatcatcgccacgatggcggcgaccttgaccagcgacagccagaactccagctcgccgaaaaccttgacgctgcacaggttgagcgcgccgataaacaggatgatgctgagcacccagacccactgggcgacgtccgggaaccacagccccatatagatgccgaaggcagtgacgtccgccagggcgacgatcaccatttcaaaggtgtaggtccagccggtgaggaacccggccagcgggccgagatagtggctggcgtagtggccgaacgaaccggaaactggctggtgcaccgccatttcgcccagcgcgcgcatcaccatgaataccgccgcgccgcccaccaggtaggccagcagcaccgccgggccggccagctggatggcgccggcggagccgtagaacaggccggtgccgatcgccgagccgagagccatgaaacggatatgtcgcgcgtttagtccgcgtctgagttgtgttgtttcgttacgcatgttgcttcccgttaagtgtttgccgaacaggcacgcgctgcccgcgccgggtggaacgcacccggcggggcagaacaaactgcgtgattcagtatgtgatgattatgcctggctaggcagcagcgccgcaggcagcagcgatgtcaggtgaccggccgccaagagttggctggcggcttcaatgtcgggggcgaagaaacgatccttgtcgtagaaactgacatgctcgcgcagcagacggcgcgcctgctccagaccttccgaggtcttcaggccgttgcggaaatccaggccctggcaggcggccagccactcgaccgccagaataccgcgtacgttgtccgccatgttccacaggcggcggccggcggccggcgccatggaaacgtggtcctcctggttggcggaggtcggaatgctgtcgacgcttgatggatgcgccagcgctttgttttcgctggccagcgctgcggcggtgacctgagcgatcatgaagccggagttcacgccgccgttctccaccaggaacggtggcagctgcgacatgtgtttgtccatcatcagcgagatgcggcgctcggacagcgaaccgatttcggcgaatgccagcgccaggttatcggcggccatcgccaccggttcggcgtggaagttgccgccggacagcacgtcgccctgttcggcgaacaccaacgggttatcggagacggcgttggcttcgatctccagcacctcggcggcctgacggatctgcgtcaggcaggcgcccatgacctgcggctggcagcgcagggagtaaggatcctgcactttttcacagttgcggtgcgagtcggagacttcgctgcgcgcgccgagcaggtggcggtaggcgagggcggcgtcgatctggccgcgctggccgcgcacctcgtggatacgcgcatcgaacgggctgcgagagcccagcgccgcttccaccgtcaggctgcccgccacggtggcggccgcgaacagatcttcggcatcgaacaggccgcgcagcgcgaaggcggcggagacctgggtgccgttcagcaatgccaggccctctttcgccgccagcgtcagcggtttcaggccggctttggccagcgcttcggtcgccggcaaccattgaccctgatggcgtgccttaccttcgcccagcagcaccaggctcatgtgtgccagcggcgccaggtcgccggaggcgccgacggagcctttaagcggaatatgcggatagacttcggcgttgaccagcgcgatcagcgcctggataacttccaggcgaatgccggagaagccgcgcgacaggctgttgattttcagcaccatgatcaggcgcaccagattgtcgtcggtcggctcgcccacgccggcggcgtgtgacagcacgatcgagcgctgcagattttccaaatcgtcgcgggcgatgcgcgtcgaagccagcaggccaaatccggtgttgatgccgtatgtggtgcggttttcttcaacgatgcgctctacgcaggccacgctctgctggatagggccgtaggcgttgtcgtccagcgtcagcgtcaccggatgttgatagacgtcgcgtagctgggccagcgtcagtttgcccgggcgaatagtcagcgctttcatgctttttctccttgggtggcggcaaccatcggcaggttcaggccttgctcgcgggcgcagtcgatagcgatatcgtagccggcgtcggcgtgacgcatgaccccggtagccgggtcattgtgcagcacgcgggcgatgcgctcggcggcctcatcggtgccgtcgcagacgatcaccatgccggagtgttgggagaagcccatgccgacgccgccgccgtggtgcagggaaacccaggtggcgccgctggcggtgttcagcagggcgttcagcagcggccagtcggagaccgcatctgagccgtctttcatcgcttcagtttcacggttcgggctggaaacggagccggaatccaggtggtcgcggccgatgacgatcggggcggacagttcgccgcggcgcaccatctcgttgaacgccaggcccagcttggcgcgctggccgaggccaacccagcagatgcgcgccggcaggccctggaagctgatgcgctcgcgcgccatgtccagccagcggtgcaggtgctcgtcatccgggatcagctctttcaccatggcgtcggttttgtagatgtcctgcggatcgccggacagcgccgcccagcggaacggcccgatgccgcggcagaacagcggacggatgtaggccggcacgaagcctgggaagtcgaaggcgttgtcgacgccggtttctttcgccatctggcgaatgttgttgccgtagtcgaaggtcggcacgcccatctgctggaacgccagcatggctttgacgtgatcggccatcgattgcttggcggcggcgaccactttggccggctcggtttgcgcgcgctggcgatactcttcccagctccagcccttcggcaggtagccgttcagcggatcgtgggcgctggtctggtcggtgaccatgtccgggcgcacgccgcggcgcaccagctcaggcaggatttccgccgcgttgccgcacagagcgatggagatggctttgccttctgcggtgtattttttgatgcgggccagcgcgtcgtccagatctttggcctgctcatcgacgtagcgggttttcagacggaaatcgatgcggctctgctgacattcgatgttcagcgagcaggcgcccgccagcgtcgcagccagcggttgcgcgccgcccatgccgcccagaccggcggtcagcacccaacgcccctgcagactgccgtcgtagtgctggcggcccgcttcgacgaaggtctcataggtgccctgaacgatgccctggctgccgatgtagatccagctgccggcggtcatctggccgtacatcgccaggcctttggcgtccagctcgttgaagtgttcccaggtcgcccagtgcggcaccaggttggagttggcgatcagcacgcgcggcgcgttgctgtgggttttgaatacgccgaccggcttgccggactgcaccagcagggtttcgtcttcttccagcgttttcagggtttcgacgatcttgtcgtaacaatcccagtcgcgcgcggcgcggccgatgccgccgtacaccaccagctcgtgtgggttctccgcaacttcaggatcgaggttgttcatcagcatgcgtaacggcgcttcggtcagccagctttttgcgtttaattgtgtgccgcgtggcgcgcgtacatcgacattgcgaactttgttatttgtagtcacagcattttcctcaaacagtatcggtgcagattccatgccgcggtggggatgagtaccacggcataacaatgcgtagggcttattaacatatacttgtatgtacaagcatatgcaacactgaccagttgccgctgaaaagtggcataagaaaaagttattttctttttatatcaggttgatatgcgattttttatcgccggtctcagatacggaaagccggagaaaagtgagctgttcggcaaaaatgaattaaaattgactcatttttgggcggctagtcacaatatttttacagactgattacagttggcggcggaggataaacaagccctatcaccgcaggaagaaagcccgccgtgggcgggcttgccaggctcaggcagccggttgcagcatcggcttgcggctcatcttgcacaccgtggcgatggcggcgatcagagccggtacgcacaggaacatcaggatgctctgcacttcccactgcatcgccagcagttgggcgcccatcatggtgccggcgacgccgccgaagcggccgatgccctgcatccaggcgatgccggtggcgcggctgtgggtcgggtagaaggtggccgccagcgtttgcagcccggactgcgcgccgttcatggtgacgcccatcaggaagatgaaggcgcccagcagcacgatctgcttgtcttcggtggccatcgccacgatcagcagggcggtgacgacaaagccgctcgagaccactttgtgcgcattccagcggtccatcagccagccggccaccaggatgccgagcgtgccgccgaaggtgaacagcgaggtgagcatcgccgattgctccagctgatagcccaagccctgcatcaggatcggcatccagctcagcaacacgtagtagatcaccagccccatgaagtaggtcacccacagcatcagcgtgccgagcaggtaagggcgactgaacagcagcccgacgctggtcttggcctgcgtcagcttctcttcatacaggtaaaaacgcgtcacgccgtcgaggctctggctgacgaagcgttgcgcaatgcgtttgatcttcgccgcatcctgcccgcggttgaccatatatttgaccgattccggcagcagcaggatcagcaacaccgtcaacgccagcggcgcaatggcgccgagcaacagcacgctgtgccagccgtagctcgggatcagccacgatgaaatggcgccgccgccggccgcgcccagcggaaagccgcaatacatggtattaatcgccagcgaacggcagcgctgcggcgcgtattcggagatcagcgtgatagcgttgggcatcgccgctcccagcccgaggccggtgaggaaacgccacagcgtcaggctattgagcgagccggcgtaggcggtggccaggctcgacaggccgaagaacaggcaggaaaacaccagcacgcgcttgcggccgatgcggtcggagattggcccggctatcagcgcgccgagcgacagccccaacagcgcggcgctcagcaccggccccagatcctgcttcacgatgccccagtctttggcgaccgagggggcgatatagcccatggcggcggtatcgaaaccgtcgatggcgaggatcaggaatccgagaatgatcagtgtccagtgaaacagcgaaaacttgctgtcgtcgatggcctgttgaatgtttaactcgctggtggaatgagtcatggcaccctctaaacgcagatgtagtcgtgatgaatagtacgtggccgaaactgatgctcggcttgtgtttgcttgtatatacatctgcgcgtcggcgctttatgtcaaatataattatcttatttgttaacttcgtgttgttttctgtggagcaggttgcaccgtggatgaaaggcctaagaccggttaacaaattaaatgaacgccattggcggtgagatatgctggcggcggcgcggaggaaaaaatttaatacaattttggccgtttggtcgccgagccggaatctgcgataatcgttttttacttttccagattgagaaaccgatgcagtacccgatcaacgagatgttccaaaccttgcagggcgaaggctttttcaccggcgtgccggccatttttatccgcctgcagggctgcccggtagggtgcagctggtgcgacaccaaacatacctgggaaaaggaagcccatcgggaagtcgacctgcaacggatcctggtcaaaacagaagagagcgacgcctggggcaatgccagcgccgagcagctgctggcggtgatgcgtcagcaaggctacaccgcgcgtcatgtggtgatcaccggcggcgaaccctgcatctacgatctggcgccgctgaccgagctgttcgaacagcacggctaccgttgccagattgaaaccagcggcacccacgaaattcgctgttccgccaacacctgggtgacggtttcgcccaaggtgaatatgcgcggcggcatgaaggtgttggatcaggcgctgcggcgcgccgacgaggtgaagcatccggtggcgcgcgagcgcgacatcgaggcgctggatgcgctgctggcgacgttgcaggatgacaaggcgcgcattatcgcactgcagccgatcagccagaaagaagaggcgacccgtctgtgtattgaaacctgtatcgcgcgcaattggcggctgtcgatgcagacccacaagtatctgaacatcgcctaaaatcagggcgccattgcggcgccctttcttttaacctttatatacgcatcccgccgtacaggtctctttcaccatcaccgccgtcaattccggcagctggggcttgagctgctgccaaatccaggcggcgagcacttcgctggtgggattttccaatcctggaatatcgttcagataatggtgatccagccgttcccagatcggggaaaacacagccttgagctcggcgaaatccatcacccaaccggtgtggggatccacttcaccggtcacttccagacgcaccataaacgaatgcccatgcagacggccgcatttatggccctccggcacgtgcggcaagcggtgtgcggcttcaaactgaaaatctttaaacagcgtggttgccattattacggcctcattgactcaaaaaccgccgcatagtaccggaaagcgcgtctgcttgccatttataccgttatggtctaccgccgcgctaaccgcgcctggttaacactttttttgtttggtgtttgcggtacctatcggctggggttatgagccgaaatgttgaacggtgaaaaaacgatgaaaaaaagcgctttaatttcatctggataaaaaactttgtttaacggtttaagcgttatgccttaccagaaaaacagcttagtcattttggttatgatttattgctatcccttatttaatcgttgctattctgctcggtaaccttacaaactctcctgatcttttccgcacacccgacgcagcgaagagacagcgactgacactggcgcgcgcctggcaggaaaggcgctaagtataggaaataagtacagcaatgacgactcaggctcctccaacatctttgctcccgctgacgcccgaacagctggcgcgcctacaggcgacgatcggcgactattcgccgacgcagctggcgtggctgtccggttatttttggggcatggtcaatcaacagcccggagccgtggccattgcgcctgttgcccctgcggctgccgccggcatcaccatcatttccgcttcgcagaccggcaatgcgcgccgcctggcggagcagctgcgcgacgatctgctggccgccaatctgagcgccacgctgatcagtgccggcgactacaagttcaagcagatagctcaagagcgcctgctggtgatcgtcgcctccacgcaaggggaaggtgagccggcggaagaagcggtggcgctgcataaattcctgttctcgaaaaaggcgccgaagctgaatgataccgcttttgcggtgttcgggctgggcgacacctcttatgagaatttctgccagtctggtaaggatttcgacggcaagctggccgagctgggcgccgagcgcctggtggagcgcgtggacgccgacgtggagtaccaggaactggccgccgcctggcgcaaacaggtggtgtcggtgctgaaggcgcgcgcgccggcggaaagcgccgcgccgggcgtgttggccagcggcgcggtcgatctgatcgacagcagcccgtacagcaaggaacagccgctcaccgcccaactggcggtcaagcagaaaattaccggccgcgcgtcggataaagacgtgcgccatatcgagatcgatctgggcgactccggcctgcgctatcagccgggcgatgcgctcggcgtatggttcgacaacgatccggcgctggtggacgaactggtgcagctgttgtggctgaaaggcgacgagccggtcgaggtggaagggcaaaccctgccgctggcgcaggcgctgcgcagccatttcgagctgacgcagaacaccacgccgatcgtcgataaatacgccgcgctgtcgcgcgacgaaacgctgatcggcctgctggcggataaagccgcgctacagcagtacgcgcacaacacgccgatcgtcgacatggtgcgccaggcgccggcggatctgagcgccgaacagctggtcggcctgctgcgcccgctgacgccgcgcctgtattccatcgcctcttcgcaggcggagaacgaaagcgaagtacacatcaccgtgggcgtggtgcgttacgacatcgacgggcgcgcccgcagcggcggcgcctccggcttcctggcggatcgtctggaggaagacggcgacgtgcgggtgtttatcgaacacaacgataacttccgtctgccggccaacccggaaacgccggttatcatgatcggcccgggcaccggcatcgcgccgttccgcgcctttatgcagcagcgcgacgccgacggcgccggcggcaaaaactggctgttcttcggcaacccgcactttaccgaagatttcctgtatcaggtcgaatggcagcgctacgtgaaagacggcctgctcacccgcatcgatctggcctggtcccgcgaccaacaacataaaatatacgtacaagacaaactgcgcgaacagggcgcggaagtgtggcgctggattcaggaaggcgcgcacatttacgtctgcggcgatgccaatcgcatggcaaaagacgtggaaaacacattactggaactggtggccgagcacggtggcatggataccgagcaggcggatgaatttttaagtgagctgcgccttgagcgccgttatcagcgagatgtttactgatgagtgataaacaccccgggcctttggtagtcgaaggcaaactggccgatgcggagcgcatgaagaaggagagcaacttcctgcgcggcaccatcgccgaagatttgaacgacggcctgaccggcggcttcaacggcgacaacttcctgctgatccgttttcacggcatgtaccagcaggatgaccgcgacattcgcgccgaacgcgccgagcagaagctggagccgcgccacgccatgatgctgcgctgtcgcctgccgggcggcatcatcagcccgcagcagtggctgggcatcgacaagttcgcccaggagagcacgctgtacggcagcattcgcatcaccaaccgccaaacgttccagtttcacggcattctgaaaggcaacgtcaaaccggtgcaccagctgctgaaccgcctggggctggacgcgctggcgaccgccaacgacgtgaaccgcaacgtgctgtgcacctccaatccggtggagtccgagctgcatcaggaagcctacgagtgggcgaagaagatctccgaacacctgctgccgcgcacccgcgcctacgcagaggtgtggctggatcaggagaaggtggccaccaccgacgaagagccgattctggggccgacctacctgccgcgtaaatttaaaaccacggtggtgatcccgccgcagaacgacgtcgatctgcacgccaacgacatgaactttgtggcgatcgccgaaaacggcaagctggtgggcttcaacctgctggtgggcggcgggctgtccattgagcacggcaacaagaaaacctacgcgcgccaggccagcgagttcggctacattccgctcgagcatacgctggcggtggcggaagcggtggtgaccacgcagcgcgactggggcaaccgtaccgatcgcaagaacgccaaaaccaaatacacgctggagcgcgttggggtggacgttttccgcgccgaagtggaaaagcgcgccggcatcaccttcgcgccgatccggccgtatgaattcaccggccgcggcgatcgcatcggttgggtgaagggcatcgacgatcagtggcatctaacgctgtttatcgagaacggccgcctgctggactatccggggcgcccgctgaagactggcatggcggagatcgccaagatccataaaggcgacttccgtctgacggcgaaccaaaacgtgatcatcgccggcgtgccggaaagcgagaagacgaagatcgaagccctggcgcgcgatcatggcctgatcgacgaccagatcagcgagcaacgcaaaaactcgatggcctgcgtgtcgttcccgacctgcccgctggcgatggcggaggccgagcgtttcctgccgcagtttgtcaccaaggtggaagggatcatgcatcggcacggggtgggcgacgagcatatcgtgctgcgcatcaccggctgcccgaacggctgcggccgcgcgctgctggcggagctggggctggtgggcaaggcggtcggccgctataacctgcatttgggcggcaaccgcgaaggcacgcgcattccgcgcatgtaccgcgagaacatcaacgaagatgagatcctgagcgagatcgacctgctggtggggcgctgggcgaaggagcgcaacgctggcgaaggtttcggcgacttcaccgttcgcgcgggcgtcgtcaaaccggtgctggatccggcgcgagatttctgggagtgaggccgggcggtccctgggcagaggggccgcacagataatttcaagtatcaggagagacaacatggctgaattcgatctggcggcgctgaacgcgttgcccaaatccgggcaggcgctggcattggcggtggtcaacggccaactggagaccctcagcgccgaacagcgcgttgaatgggcgctggagcacctgcccggcgagttcgtactctcgtccagtttcggcattcaggcggcggtatgcctgcacctggtgacgcgtatccgcccggatatcccggtgatcctgaccgacaccggttatctgttcccggaaacctatcgctttatcgatcaactggccgaccagctgaagctgaatctgcaggtgttccgcgcggagcagtctcccgcctggcaagaggctcgctatggcaagctgtgggagcagggcgtggaagggattgaaaaatacaaccagatcaacaaggtcgagccgatgaaccgcgcgctggagacgctgggcgcgcagagctggttcgccggcctgcggcgcgagcagtccggcagccgcgccaatctgccggtcctggcggtgcagcgtggggtgttcaagatcctgccgatcatcgactgggacaaccgcaagatttaccagtatctgaccgaacatgggctgagttatcacccgctgtgggagcagggctacctgtcggtaggtgatacacacaccacccagaagtgggagccgggcatgagcgaggaagagacgcgtttcttcggcctgaagcgcgagtgtggcctgcacgaaggctaaacggcgtgattgacatgacagggctcagcaatgctgggccctgtttttttgcgggctactttttcttctgtgctttcggcgggtgcgcctgcgccagctctttgatcagcggcagcaggatctgcacgctgtcgcggctgcgtttgtcgatccgccccggcaggtagcgatccagatactgcagattgtcatactgcggacggtgccaggtgatgccctgcgggaagtgcgggctgacggcgcgctgctggtagccatctttgtcgcccagcgaccagttggtggcctccaccgacagcaccgggatgcccgcggcgtcgaacacctcttgatcggagcagcagccggtaccctgcgggtgctgtgcgctgcccggattggtggcggcggcgatgccatagcggtgggcgatatccagcgcgcgatcgcgggaacgcttcgccatttgcggcggcgtgttgcgcccggcgttgaaatacagacgatcgccggtgatcaggctgtcgaggttgatcaccagtacggtgttgcttttctcttccgcgctcatgcgctgcaggtagttctgcgcccctagcgaaccgatctcttcggcgctggtggcgacgaagcgcaggccgtaggcggtggggatgttcttcaggcgttccgccagttccagcatcacgccgatgccggaggcgttgtcgtcgacgccctgcagcgtcaagccgccgagattgttatccagatcttcgtcgctctgcggcgtataggtgtcgaagtgggcgacgatcactatctgtttcgggctgtcgccgttgcgggcggcgatcaccgagctggcggtgacgttgttccagttcttcttgccgtctttgctggtgtagagatagcgcgtattgacgctgcgaatatcgctttggtagcccatcttgctgaactgctgcttcaggtagtcggcggtgagcaattcggccgggctgcccgccatgcggccggggaagtaagtggcgatgtggcgggtctgttcggcggcgaaacggcccattggcgcgtcttttgcgggctgtgcggcacacacgctgaagacgccgccgagtgcgagggccagcaggctggtcttcaggtaaaaacgggaaaacataccgaaaaatccttctttgctatcggcgctgccgatcatttttctgcggcacccagtatgagacgccgggcggcattacacaatttccctgtctcttaatttcgcgcgaacgcgcaaagcatcgcctcgattatcaccgtttgcctcctgcgctgcggcctatattccataaaggaactaatcattccttttcgtcatttcagaggctaaatctcagcccgtatagtcacactatctttctgttatatgaaaaggctgttgtggactatctaccaatattcgccgacctgaaacaacgtccggtgctggtcgttggcggtggtgacgtggctgcgcgcaaagtcgatctgcttcagcgcgccggggctgaaatacggatagttgcgcagtcactctcaccggaactggaacaacaacgtcagctggggcgggtgctctggctgggggaaagctttgatccgcagcagttggacgacgtgtttctggcgatcgccgccacggacgacaacgcgctgaacgccgcggtgttcgccgaggcggataagcgccgggtgttggccaacgtggtggacgatcagccgcgctgctcgttcatcttcccgtcgatcatcgatcgctcgccgctggtggtggcggtgtcgtccagcggccaggcgccggtgctggcgcgcctgctgcgcgaaaagctggaggcgttattgcccgccagtttggggcagatggcgcaagtagcgggccgctggcgcggccaggtcaaacagcggttggcttcgatcggcgaacgtcgccgtttctgggagaaaacgttcggcggccgtttcgccacgctggtggccaacggccagacggcgcaggcggaacggcagctggagcaggatttacaccacttcgccgcaggcgatgaaggcgcacagggcgagatcgccctggtgggcgccgggccgggcgacgtggggctgttgaccctgcgcgggctgcaggtgatgcagcaggcggacgtggtgctgtatgaccatctggtcagcggcgagatcctcgatctggtgcggcgcgacgccgagcgcatctgcgtgggcaagcgcgccggcgcgcactcggtgatccaggaagagaccaaccggctgctggtggagctggcgcagcagggcaaacgggtggtgcgcctcaagggcggcgatccgttcatctttggccgcggcggcgaagagctgcaggtagccgccgccgccggcattccgttccaggtggtgccgggcgtcacggccgccgcaggggcgaccgcctacgccggcattccgctgacgcatcgcgaccacgcgcagagcgtgacctttatcaccggccactgccgccccgacggcgatggcctggactgggccgatctggcccgggcgcggcaaacgctggctatctacatgggcaccatgaaggcggcggacatcagccaacgcctgatcgcccatggccgcgacgctgcgacgccggtggcggtgatcagccgcggcacgcgcgccgatcagcaggtgcagatcggcacgctggatcaattggaactcctggcccaacgggcgccgttgccggcgctgttggtgatcggcgaggtggtggaactgcatcatcaaatcgcctggttcgggcatcaatcgcagacggaaggggccgcgcgcccggccgtcgtgaatttggcataggcaaggcttttaaggacctgttatggacgaaaaacgactcactcatttgcggcaattggaggcggagagtatccatatcatccgtgaagtcgccgctgaattcgccaacccggtgatgctgtattccatcggcaaggactcttccgtgatgctgcatttggcgcgcaaggcgttcttccccggcacgctgccgttcccgctgctgcacgtcgataccggctggaaattccgcgaaatgtacgaattccgcgatcgcaccgcgaaggagtacggcttcgagctgctggtgcataaaaacccggaaggggtggcgatgggcatcaacccgttcgtgcacggcagcgccaagcataccgacatcatgaagaccgagggcctgaagcaggcgttgaacaagtacggttttgacgccgccttcggcggtgcgcggcgcgatgaggagaaatcgcgcgccaaagagcgcatctactcgttccgcgatcgcttccaccgctgggatccgaaaaatcagcggccggagctgtggcacaactacaacggccagatcaacaaaggggagagcatccgcgtcttcccgctgtcgaactggaccgagctggatatctggcagtacatcttcctggaaaagatcgacatcgtgccactgtacctggcgaaaccgcgcccggtggtggagcgcgacggcatgctgatgatggtggacgacgatcgcatcgatctgcagccgggtgaagtgatcagccagcgcatggtgcgtttccgcaccctggggtgctggccgctgaccggcgcggtggactcgcaggcgcaaaccctgccggagatcatcgaagagatgctggtctccaccaccagcgaacgccaggggcggatgatcgatcgcgatcagtccggctcgatggagctgaaaaagcgtcaagggtatttctaaggagccgccggatgaacaacgcaattgcacaacaaatcgctgaccagggcggcgtcgagtcctatctgcacgcgcagcagcacaagagcctgctgcgctttctgacctgcggcagcgtcgacgacggcaaaagcaccctgatcggccgcctgctgcacgatacccgccagatctacgaggatcagctgtcgacgctgcacagcgacagcaaacgcatcggtactcagggcgaaaagctcgatctggcgctgctggtggacggcctgcaggccgagcgcgagcagggcatcaccatcgacgtggcctatcgctatttctcgaccgaaaaacgtaaatttatcatcgccgataccccggggcacgagcagtacacccgcaacatggccaccggcgcctcgacctgcgatctggcgatcctgttgatcgacgcgcgcaaaggggtgttggatcagactcgccgccacagctttatcgcgaccctgctgggcattcgccatctggtggtcgcggtaaacaaaatggatctggtggactatcaggaagcggtgttcgagcagttcaaacaggattacctgaccttcgcccagcagctgcctggcgatctggacatcaagttcgtgccgctgtcggcgctggacggcgacaacgtggcgagcgaaagcgcccatatgccgtggtacagcggcccgacgctgctggaagtgctggagagcgttgacgtgatcagcgagcgagaaaaccagccgctgcgcttcccggtgcagtacgtcaaccgcccgaacctcgatttccgcggctatgccggcacgctgtccgccggcgtagtgcgggtggggcaacgcatcaaagtgctgccttccggcgtggagtccagcgtggcgcgtatcgtgaccttcgacggcgatctgccagaagcggtgccgggcgaggcgattacgctggtactgaaagatgaagtggacatcagccgcggcgatttgctggtcgacgccggcgaaagtctgcaggcggcgcagagcgcgcgggtggacgtggtatggatggccgagcagccgctggtgccgggccagagctacgacatcaagatcgccggcaaaaagacccgcgcccgcgtggagagcattcgccatcaggtggagataaacacgctggcgcaacacccggccgacacattgccgctcaacggcatcgggttggtggagctgaccttcgacgaaccgctggtgctggacagctatcagagcaatcacgacaccggcgggctgatcttcatcgatcgcatgagcaacgtgacggttggcgccggtctggtgcgtgaaacgctgcaggatgcctcggcggcgcgcggcgaattcagcgccttcgagctggagctgaatgcgctggtgcgcaagcacttcccgcattggggcgcacgcgatctgctcggtggccgataaggtggccgctgaactgagggcgaccgggccggacgatgagaacgtggtttggcatccgcatgcggtgacgcgtgcggatcgcgaagcgcgcaacggccaccgcggcgcggtgctgtggtttaccgggctgtccggctcgggaaaatccaccgtcgccggcgcgctggagcaggcgctgcatgggcttggcgtcagcacctatctgctggacggcgataacgtgcgccacggtctgtgccgcgatctcggtttttccgacgaggatcggcgcgagaacatccgccgggtgggggaagtggccaagctgatggtggacgccgggctggtggtgctgaccgcattcatttcgccgcaccgcgccgagcggcaaatggtgcgcgagatgctcggcgacgatcgctttatcgaggtgttcgtcgacacgccgttggcgatctgcgaggcgcgcgatccgaaagggttgtataaaaaagcgcgcgccggcgagctgcgcaatttcaccggtatcgacgcggtttatgaggcgccgcagcagccggaaatccacctcgacggccaacaattggtaacaaatttgattgcgcaattgttagacgtgttgcgtggtcaggctattatcaaaccctgaattaaaaaaaagcgtgtggcgtttttcgccatgcgctttttactctaagccgccgcagagcgagccgaataaccagggatcactatgcaaaatgtcacgcctatcttgatcgactccaagcagtcaaaacaggagagagaggagccttcttattctttcctgggcggcgtcagcggctttgttttctactggctggcgttcgcgttgccgtttctggtttacggttccaacacgctgtttttcctgctctatacctggccgttcttcctggcgctgatgccgctgtcggtgctgatcggcatcaccctcagcatgctgttgcgcggccgtctgatcctgacgctgctgctgaccggcgcgatcgtgctgtgcctgttctggctggtgttcagcttcctgaccgggtggtgagagagcgggcgccgatgccggcgcccgaaggattgcaaagccgtgtcgaaggttacaaaactttgctcagaaacgcctgcgtgcgtggattggccggctggctgaagatctgctgcggcgcaccctcctcctgaatgatcccctgatcgataaacagcacccggtcggccacctcgcgggcaaagcccatctcatgcgtcaccaccaccatggtcatgccctcgtgggccagtgatttcatcaccgccaacacttcgcccaccagctcaggatcgagtgcggaggtcggctcgtcgaacagcatgatcttcggctccatcgccagcgcgcgggcgatcgctacccgctgctgctggccgcctgacaggctgttggggtaggcgtcgatcttgtcgagcaggccgaccttgagcagcagctgttctgcttgcgcgatggcttcggcgcgcggctgtttcttcacgctcaccggcgccataatgatgttttccaacaccgtcatgtgcgggaacagattgaaacgctggaacaccatgcccacgctttcccgcattttgttcaggtcggttttctgatcgtggacggcgaagccgttcacctcgatctcgccgccggagagcgtttccagcgcgttgatgcagcgcaggaaggtgcttttgcccgagccggaggggccgatgacacacaccacttcgttggcggcgatctggcaagaaatgccgcgcagcacgtggctttcgccgaactgtttttgcaggttatgtacgcgaatcacttttaccgaacctcttttccatatgctgcaccagcagcgagagcaggaaggtgatgacccaatagaccagcgaaatggtcagatagggctcccagtaggtggcgtaggcgccggagacggtacgggcggcataggccagatccgccaggccgatggcggaggccagcgacgaatccttgacgatggcgatggcgttgttgcccagcggcggcagcatgcgccggaaggcctgcggcaggatcacctggcgcatggtcttgccatagctcatgcccagcgagcgtgaggcttccatctggccgcggtcgatagactggatcccggcgcggaagatttccgacacataggcgccggcgttgagcgtgatcgccaccacgcaggagagaaaggcgccgtagtcggcgcgcagcgcacgggcgaaatcgacgctcatcagaccgctggtgaccagcagaccgtcacgcgggttgatgaacagcggcaccagcgcgaagtgcaccaccatgatctgcacgaacagcggcgtgccgcgaaaggcgctgatgtagatgcgtaccggccactgaacgccgtaatgcaggatgggtttccagatgccgtgcggcgcctgcgccaaacggcccagcccgaggatcaagccccaggtggtgcccagcagcacgcagataatggtgcatttgatggtcatccaggcgccttccataaacagcggcgcgtattcctggatgatctcccagcggaagttcaaggggtattccttcttggtaggctgaaacggtggtgcgccgacgcccttgcgggcgccggctactggggattattccgccggcagcgtcggtacgttgctgtcgaaccaggtttggtagatcttggcgtaggtgccgtcggcgacgattttcttcaggccggcgttgatcttgttgcgcagctcatcgttgcctttggcgacggcgatgccgaaatactggcgctcgaacttggcgtcgggcaccagcttgaaggctttctcagggtgggtcttgatatagaacttggccacgccgacgtcgccgaccgccgcgccgatgccgtcttcatacagctcctgcagcatcagcggggtattgtcgaagcgcttgatggcggtgctgtttttacccagcgcgtcggacaccacgatgtcgccggtgctggagttcaccacgccgaccttaagcgctttcagcgcggcgatggagtccaccgtcgagtcttgcggcaccacgatagcctgctcagccgggaagtaaggcgcagagaaatcaaccatctgcttgcgtttatcggtgatggtgatgccggaaatgatgatatcgcgatcgccggagttcagtgtggcgaagatcccttcccacggcgtattgatcagtttgatttggaagccttcggccttggccaccgccttgatgatgtcgatgtcgaaaccttccagctgcttttggctgttttcaaattcgaatggccgataggtgccgccggagccgacgacgtaggtgggttcagccgccaacgcagcgatggagaaggtggcggccaggcaggcgccgatcagaactaaacgttttaacatcgcgatccccgataatgaatggttatatattggaattatttatgcactatgagtgcataaaaataagcttcaatgaatgaaagtgcaaccgctgcatgacgattattctctctatggtgttaaatattcactttttgctttgctttggcgtaagcgatgtgtcaggaagcggtgatgcagtgattcttgctgcataatggaggtaggatagagtgtgtctcattggaaaacgcggcgcgtgcgccgagccaaaggggcgttttttgccgctttcgcagcggaattaggcgataaacacgggaacccttcatccgtattctgaatttggcgttgaaatgccgctctcagtgtggagtccaacgagaagttgtgggatgattggtcggtttttcagggggcggagatgggaaaacttacgctgctattgctggcattgctcggttggttacagtattcactgtggctgggcaaaaatggtattcacgattacgtgcgagtcaatgaagacgttgcggtccaacagggtagcaacgccaagttgaaagcgcgtaacgatcagctgtttgccgaaatcgatgatttgaacggcggtcaggaagcgatcgaagagcgtgcgcgtaatgagctgggcatgatcaagcccggtgagactttctatcgtctggttcctgaccaatccagacgcaacgcggcgtcttcctcgcaaaataacgcacaaaaataacgcatgaatcactccgcaggcacctttccctcggtgattgccgtcctgcccgctgccggtatcggcagccgcatgcaggcggaatgcccgaagcaatatttaaccattggccggcacagcatcgtcgaacacgccatccacgccctgttgcgccacccgcgcattgaacgggtgatcgtggcgatcggccccgaagatcgtcagttcgaacggctacccatcgctcaggatccgcgggtaaccgtcaccgagggcggcaaacagcgcgccgattcggtgatggccgggttgaaactggcgggtgatgcggactgggtgctggtgcacgacgccgcgcgcccctgcctgcacgccgacgatctcgagcgcctgctggcgatcaccgcacacagcaaggtgggcggcattctcgccgcgccggtgcgcgacaccatgaagcgcgccgaacccggccgcgacaccatcgcccacaccgttgaacggcaggatctgtggcatgcgctgacgccgcagctgtttccgctgccgctgctcaagcagtgcctgcagcgcgcgctggatgaaggcgcgaacgtcaccgacgaagcctcggcgctggaacattgcggctatcatccgcagctgatcgccggccgggcggacaacattaaagtaacgcggccggaggatttggcgctggcggcgttctatttgacccagttagacaattaaggagcgcatcatgcgtatcggtcacggttttgatgtacataaattcggcggcgaaggcccgttggtgatcggtggtgttcgcatcccttacgacaaaggcttgctggcccactccgacggtgacgtcgcgctgcatgccgccaccgacgccctgctgggggcggcggcgctgggcgatatcggcaaactgttccccgataccgatccggccttcaaaggcgccgacagccgcgagctgctgcgcgaagcctggaaacgcatccgcgccaaaggttaccgcctcggtaaccttgatatcaccatcatcgctcaggcgccgaaaatggcgccgcacatcccgcagatgcgcgtcttcctggcggaagacctgcagtgccatatggatgacgtcaacgtgaaggccacaaccaccgagcagctcggtttcaccgggcgcggcgagggcatcgcgtgcgaagcggtcgccttgctgatcaaggaataaccgcatggatatggcgaatctgacctggctgcatggccggccgcagagttccggggtgttgaaagccaatccggaagatttcgtggtggtcgaagatctgggctttgcgccggacggtgaaggtgagcacgtgctggtaaatatccgtaaaaacggctgcaatacccagttcgtggccgactatctggcgcgcttcgccggtattcacgcccgttccgtcagctatgccggtttgaaggatcgccacgcggtgaccgaacagtggttctgcctgcatatgccgggtaaggacacgccggatttctcccggtttacgctggaaggctgcgaggtgctctcgttcgcccgccacctgcgcaaaatgcgcatcggcaatctgaagggcaaccactttacgctggtgctgcgccagatttccgatcggcaggacgtggaacgtcgcctgcaggccatcgccgcgcagggcgtgccaaactatttcggcagccaacgcttcggccgcggcggcaacaacctggtgatggcgcgccgctgggcgaacgacgaaattcgtgtcaaagagcgcagtaagcgcagcttctacctgtccgccagccgcagcgcgctgttcaatctgatcgcgagccaacgcctggctgacgggctgcagcgcaccgtgctggaaggggatgccctgcagctgagtgggcgcggcagctggttcgtcgccaaagccgatgagctggagacgttgcagcaacggctggatgccggcgagctggcgatcacggctcccttgccgggcgacggtgagccaggcaccgccggccaagccttggcttttgaacaacaatgcttggcggaacaaccggaattgcttacgcttttaaagcgcgagcgtatcgaacccgctcgccgggccctgctgttgcagccgcaaaatttgcagtggaactggtgggatgacgttaccgtggaactgcgcttctggctgccggcgggcagctttgctaccagcgtggttcgcgagatcatgcagcaggataacagtgatgcggatattgctgagtaacgatgacggcgtcagcgccccgggcattcaggtgctggcggcggcgctgcgggaattcgccgaagtgcaggtcgtggcgccggatcgtaaccgcagcggctcttccaatgctttaacgctggagtcgccgttgcgcacgcagacgctggccaacggggatattgcggtgttgcaagggacgccgaccgactgcgtttaccttggcgtcaacgcgttgatgcgcccggcgcccgatatcgtggtatccggcattaacgccgggccgaatttgggcgacgacgttatctattccggcaccgtcgcggcggcgatggagggccggcacctggggttgcctgccttggcggtgtcgctgaacggccaccagcactacgcgaccgccgccgccattacctgccgcatcctgcgcgcgctgcagcgcgaaccgctacgtaccggaaaaattctgaatattaacgtgccggatctgccgctggctgagatcaaaggcctgcgcgttacccgctgcggcagccgccatcccgccgacaaggtcttctgccagcaggatccgcgcggacaaaatatctactggatcgggccgcctggtgataaatttgatgccgggccggataccgactttgcggcggtggaacaaggctatgtggcgataacgccgctgcaggtggatttaaccgcctacgcggcgcaagaagtcgtgaaaacatggttaaccaaggcagaggttagcggggaatggtgaataagcgcatgcaaacattgctgacgcagctgcggcagcaggggatccgagacgaaaagctgctgcgggcgatcgaagcggtgccgcgcgagcgttttgtcgatgaagcgctggatcataaggcctacgaaaacaccgcattgccgatcggttccggtcagaccatttcccagccttatatggtggcgcggatgaccgagctgctgaatctgaaacctacctcaagggtgctggagatcggtaccggttccggttatcaaaccgctatcctggcgcatctggtgcaacacgtttgttccgtcgaacgcatcaaggggctgcagtggcaggccaagcgccgcctgaaacagctcgatcttcacaatgtttccacccgccatggcgacggctggcagggttgggcgtcgcgcggcccgttcgatgcgatcatcgtcactgccgcgccgccggagatcccgcaggcactggtggagcagctggacgacggcggcattttggtgttgccggtgggcgagcaggcccaaaccctcaaacgcattcagcgtcatggcaacgatttcgttgtcgatgcggtagaggcggtgcgctttgtgccgttggtgaaaggcgaattggcctagcgattgtctgaattttcgaccgtctgcaaaatctgttgcactttcatcatggccggataaggttttctcgttccaatcaggctaattttcactagaattggcctttctacgtagttgtcttatggtgcggcaacgccaatgtggttagcattggcgcgcgttttgatgctccggcgcgagatgacctggcgttcagggatcggccggcggcgcctttacatcgcagaaactgggaagtggcaaaagctcggctacgatgtaaagggtattttggatatatcactgatattgctgtcatgggggaagcatgagcacgggaagcccaatgattacgttacgccgggtagcggtgtgtacgatggtaagtttgtggttggcgggttgtacgaatacggcctcgacgtcggctcctatcagcagcgtggggggcggcggtgccgctccatccggcaataataatggcggagtgcagcaggccagcccagagggccgcattgtctataaccgcagttataacgccatccctaaagggagttacagcggcggcgaaacttatacggtcaagcgcggcgacacgctgttttatatcgcctggatcaccggcaatgatttccgcgacctggcgcagcgcaacaatattcccgagccatacagcctgaatgttggccaaaccattcagcttggtaatggttctgccaacggcggcggcggcatgttggcgacgacagatgcgaccaaaggcggtgttccgaagccaccttccagctcccagatccagacggcaacggttgattctcaatcaactaacgcgtattctgaaaactcgggtaaacagaatgtaggtaagatgttacctgcagcaggtgccgcagcggttgggaccgcgactgcgcctgttaccgcgccggaagccgctccacctgtgagcagcaccgtcagcaacagcgctccggtcagtacctggagatggccgactgacggtaaggttattgataacttttcctcatcagaaggtgggaataagggtgtcgatatcgccggttcccgtgggcagcctatcttcgctaccgccgatggccgcgtagtgtatgcaggcaacgctttacggggttacggtaatctaatcatcatcaaacataatgatgattacctgagcgcctacgctcataacgacacaatgctggtccgggaacaacaagaagtgaaggcgggtcaaaaaatagccaccatgggtagcaccggtaccagttcagtacgtttgcattttgaaattcgttacaaggggaaatccgtaaacccgctgcgttatcttccgcagcgatagattgggcagaatacgctgagattctgctcgcggtatcacgggtaggagcagcatatgagccaaaatacgctgaaagttaacgagttacatgatgatgcggatttcgacgagaatggagctgaggccgagtcgtttgatgaaaaagcgctggtagaagaagagaccagcgagaacgatttagcggaagaagagctgttgtctcaaggcgttacgcaacgcgtattggatgcgacgcagctctatctgggtgagatcggttattcacctctgctgaccgcagaggaagaagtctattttgcgcggcgtgctctgcgcggtgacgtgccgtcccgccgccgcatgattgaaagcaacctgcggctggtggtgaaaatcgcccgccgctacagcaaccgcggtctggcgctgctggatctgatcgaagagggtaacctcggtctgattcgcgcagtggaaaaattcgacccggaacgcggcttccgcttctccacttatgcaacctggtggatccgtcagacgattgaacgggcgatcatgaaccaaacccgtaccattcgtttgcctatccatatcgtcaaagaactgaatgtctatctgcgcaccgcgcgcgagctttcccacaagctggatcatgaaccgagcgctgaagaaattgccgagcaactcgacaagccggtggatgacgtcagccgcatgctgcgcctgaatgagcgcatcacctcggtggatacgccgctgggcggggattcggagaaagcgctgctggacattctggccgacgagaaggacaacgggcctgaagacaccacgcaagatgacgatatgaagcaaagcatcgtcaaatggctgttcgaactgaacgccaaacagcgtgaagtgttggcgcgtcgtttcggcctgctgggctatgaagcggcgacgctggaagacgtaggccgggagattggcttgacgcgcgagcgcgtccgtcagattcaggtagaaggtctgcgccgtctgcgtgagattttgcagatgcagggcctgagcattgaggcgctgttccgcgaataacgccggttgttgaaccgcatcaaataaaaacggtgagcatgatgctcaccgtttttttatgcccgcgtttggcgccagattacaccatatttttcagccggtagatccattccagcgcctgtcgaggcgacagggagtctggatcaagcgcctccagggcttctactgccggcgaggtctcttcctgcagcagcgtcatctgggtggcatcgacgctgcccgacgcggtgtggctggagatggattccagctcgcgcagtttctgacgggcgcgtttgatgacgtcgcgcggcacgccggccagtgcggcgaccgccaggccatagcttttgctggcggcaccgtcttgcacgctgtgcatgaaggcgatggtgtcgccgtgttcaagcgcatccagatgcacgttgaccacgccttccatcttctcaggcagggtcgttagctcgaagtagtgggtggcgaacagcgtcatcgccttgatgcggttggccaggttctcggcgcaggcccaggccagcgacaggccgtcgtaggtggaggtgccgcggccgatttcatccattaacaccaggctgtgctcggtggcgttgtgcagaatgttggcggtttcggtcatctccaccatgaaggtggagcggccggaagccagatcgtccgccgcgccgacgcgggtgaagatgcgatccaccgggccgatggtggccttggtggccggcacgtagctgccgatgtgcgccatcagcacgatcagcgccgtttgccgcatataggtgcttttaccgcccatattcggaccggttatgatcagcatgcggcgctgcggcgacagggtgagcgggttggagataaacggctcgctcagcacctgctccaccaccggatggcggccttcggtaatgcggatccccggctgctcgctcatggtcgggcaagcgtagttcagggtatcggcgcgctcggccaggttggccagcacgtccagctcggccagcgcggcggcgctttgttgcagttccgccaggtgcggcagcagcagatcgaacagctcgtcgtacaggcttttctcgatcgccagcgccttacccttggaggtgagcactttgtcttcgtactctttcagttccgggatgatgtagcgctcggcgtttttcagcgtctgacggcgtacatagtggatcggcaccaggtggctttgaccgcggctgacctgaatgtaatagccgtgtacgccgttgaagccgaccttgagcgtatccagacccagcttttcacgctcgcggatctccagccgatcgaggtagtcgctggcgccgtcggccagtgcccgccactcgtccagttcgctgttgtaaccgggggcgatcacgccgccgtcgcgcaccagcaccggcggtgattcaatgaccgcgcgttccagcagctcgcgcagttcgtcaaactggcccacctgcgacagcagctgctgcacgtgcggcgttttcacatcctgcagcagcgcgcggatgtccggcagttgctggaaagcatggcgcatgcgcgccagatcgcgcggccgggcggtgcgcagcgccaaacgcgccaaaatacgttcctgatcgcctacctgacgcagcgaaggctgcagatccgcgaacagttcttgtaatgcgccgatcgcctgctggcgggcggtcagcaccttgatgtcgcgggtcggcatgtgcagccagcgtttcagcatgcggctgcccatcggcgtgaccgtacggtcgaggatcgccgccagcgtgttgtcgctgccgccggacaggctctgcgtcagctccaggttgcggcgggtggcggcatccatgatgatgccgtcctgctggcgttccatggtgatgccgcgaatgtgcggcagcgaagtgcgttgggtatctttgacgtactgcagcagacagccggcggcgcgcagcgcctggtgcgcctgctcgacgccgaagccggtcaagtcgcgggtgccgaactgcaggttgagctgttggcgtgcggtctcaagctcgaattcccacagcgggcggcggcgcaggccgtggcgctgttcgatcagcgccatgtgttcgaaggtttccggatagagcagctcggccggattggtgcgctgcagctcggcggccatggtttccagatcctgcggctcggcgacgcggaagcggccggagctgacgtccagcgtggcgtagccgaagccgcgcgcgtcctgccagatcgccgccagcaggttgtcctggcgttcttgcagcagcgcttcgtcggtgatggtgccgggggtgacgatacgcaccactttgcgttcgaccggccctttgctggtggccggatcgccgatctgctcgcagatggcgacggactcgccgagctgcaccagcttggccaggtagttctccactgcgtggtgcggtacgccggccatcgggatcggttcgcccgccgaggcgccgcgtttggtcagcgagatatccagcagttgggaagcgcgcttggcgtcgtcgtaaaatagctcgtagaagtcgcccatgcggtagaacagtaggatttcaggatgctgggccttgaggcgcaggtactgctgcatcatcggcgtgtgcgaatcgagtttatcggtgctattcatgcgattatttttccaatccattgaatgtaaagggaactgtgattttcattgtcgtcattcgctatcacattgtttcagcaggcgccaccccattcagcgcttggcgggcggcgcaaatcaaattatcaatacgccaaacggcgcgctcaaacccgaggtttgcacagacgcttatactagcccagcgggcaatcggctgtcacaggtaaaaatgggaagcgctgcgcaaggccggtttgcaacgaagcgagattgtcgttcgcctgcgggcaacaacgcaagtgtcgccgcccgcagtagtagtggagaggttattgcgcggcggtgagaggcaagggcagttgatagaggcggaaactgtcgggcacttcggtttcatggccgggcagcaggcggtggcggatgcgcgattcgctgacgaaggcgcagccttgcggagcgatagtcaggttgaccggcgattccatgccttcgcgtaagacctcaagctggtgcatgcctgccgccttgggtgacgggatccgcaggatccgcccttggccgctctggatcccgttttccagcacgatcagcgcgccatccggcgccaatcccattccgtccgggttttcgatgaggcgcggcagctgcatttccgtcagctgcggctttggagcgttataactgagggtgtagagcttaccggtaccgaaattggcgacagccatcagccgatcgtcgagcagcacgatgccgccgccgcgggtttccgtcacctacaccgtaccgtctgcgccgagtacgatatcgttgcccatttcgcccgccggcagcgccaggctgcggttgagcgtgccatcggcgacgttcagcgcatagatgcggttggcgcgcgttttgccgccggagaggaagtccggcgaattgccccacagcagcccacgtttttcgtccagccgcagcgcgtttgaggcgaacaccgtgtcagcgctggggaaaaaggtttcccacgcttgacccggccgcttgcgcagcacgttgccgctggtgacaaagccgacatacagcgtaccgtccgtcgcacgggcgatgccgttggggtaaagtgcgccaggcggcagcgtcatgctgtttgcggcgcagtctgcgctggcggcagcctgcaccggagcgctaagggggaatgcggcagcgagggcgagcaacaccgctcgtgcggtaagcgcatatgacatgtcttctctcctggaatgacggaaaaggggctaccagcgatcggggcggacagcgtgcgccattggcgcctccagcgcggccacatcttccggtgatagcctgaggtcgagcgcagccagcgcatcctgcagatgatgtggcttggacatgcccaccagcggcgacgccacgccgggtttggccaacagccaggccagcgcgatttgcgctggtggaacgctgcgcgcggccgccacctccgcgaccgccgcgacggtgcgttctacctcgtttctgccgccgtaccaacggggcgcctgttcgtcggtggcggcgcgcagcgtgccgccgctgccggagccggccagcacgccgcgggccagcggcgaccagggggtcagaccaagaccttcctccaggcacagcgggatcagctcctcttcatcttcacgcgtcaccaggttgtattggctttgcagcgaaataaacggcgccaggcggtgctgacgttgaaaggccagcattttcatcaggcgccaggcgtgcagcgaggaggcgccgagatagcggatcttgcccgcccgcaccaggccatcgagggtgtcggcggtttcttcgatcggcgtttcggagtcgaagcggtgcagcacgaacagatcgaggtaatccgttcccagccgctgcaaggaggcgtcgacgctgtgcagcaggtgcttgcgtgatagcccccggctgttcggctgcgcgtccattggaaagtaggccttggtggcgatcaccacgtcttcacggcgggcgaacgccctcagcgcgcggccgagaatgcgctcgctttctccgccggagtaaatgttggcggtatcgaaaaaattgatgcccgcctccagcgcctcgcggataaaggggcgcgcttcatcttccttcagcacccagggccgccaggccggatcgccgtaggtcatgcaacccaggcagaggcgggacaccttcaggccgctgtcgccaagccgaacgtagttcatggcctcgtctcctcaacgcatgccggcgatggtgtaaccgccgtccaccagcaggctttggccggtgatgaagcgagcttcgtccgtcgccagccacagcgccacatcgccgatgtcttccgattcacccaggcggccggcgggcgtgtgggcgataaagggcgcgaaggccgcgctgtcagccacgctgccgcgtgccattggcgtgtcgatgatgccggggttgatgttgttgacgcggatgccctggccgctgtattcgagcgccaccgcgcggatcatcgcatcgagcgcgcccttgctggcggagtagctggatgagccggccagcgcgccgtgggtcagccaggaggaggtgttgatgatcacgccgcccgagcgctgagccaggaaggtttcaatctcatatttcatcgccagccagacgcccctgaggttaatggcgataacccggtcaaaatcctcgctggtctgctcggtgatgggggcgaagttgccgatgatgccggcgttgttgaaggcgacgtcgagccggccgtaatgggcggtcaccgtggcgatcagttggcggatatcgccttcctgagagacgtcggccacgatgggcagggcgtcgccgccggccagcgcgatgtcgcgcgccgtggcttcgatttccgccgcgcgtcggccggccagcgcgactttggcgccttcgcgggcataggccagcgcggcggcgcggccgatgccggtgccgccgccgctcaccagtacgactttgtccgccagacggcgcggcgtttcatgagttggagctgtagcattaatcatcgtatcgatacctggtaatggggtcgatcgcaatgctatgttgttagatgacggataactatccgctaaaaattcatctcactattagataatttatatcaatagcatgaaaaaacctgaactgtccggcctggcggcctttgtggctatcgccagtgaacgcagcttccgccgcgccgccgcccgattgggcgtgacgccgccgacgctgacccacaccctgcgcgaattggaagcgcaggtgggcattcgcctgctaaaccgcaccacccgcaacgtctcgccgacggaggccggtgagcatctgctggcacagctggtgcccgcttttaccgacatcgacgccgcgctggagagcctgaatgtgtttcgcgaagggccgcgcggcctggtgcgcatcaacgcgccgcgttcggccatcgatcttgccatcgtgccgcatctggagcggttggcctgcgagtaccccggcattacgctggaagtggtggcggacgaggggtttgccaacattgtcgaacagggctttgacgccggtattaggctcggcgaggatctgcacaacgatatgcgcgcggtgcgtctgacgccggatctgcgtttcgccatcgtcgccacgccggactattttcaacggcacggcgaaccgacgcatccacaggatttgctgcagcaccgctgcatcggttggcgcaaggcctcttcgggcgagcgctacaaatgggcatttcagcagggccagcagcggttttccgtggcggttaacagcccgttgatactcgatgacggcaggatgatggtgcaggcggcgctggcgcacgtcggcatcgctttcgccatcgaacaagaggtagaagaacacctggcgagcgggcggctgcggcgggtgttggccgactggtgcgcgccgtttaccggtttttacctctattaccccaaccgcaggaatcattccgtggcgctgagcacggtgatcgagttgctgcgtctgcccacctaatcctcttcaccggctatcgcgttcggatggctgtaggtgaatcaagcttgaactatttttattcccttttcgtttgttcaggcgcaaataaacccttaaattctcggtgagtttgtaacttgctgtttataattgttatttgaatatttattacgaatattccgagtttttatcggttatttgagagcccggtcacactatttttttgtgcgaaatgtgaagggggtcaatccgtcaggtcaatgagagacggttatgtctcctcctggcttaccgatccgtttttcatgctccgtatactgtccgtaaccagggcaacgtgacggaaattttcataaggaatgtgcgtgaagcaatcgtgattgcatctggcatacaaataacacggggtttttttgattatctgaggtgcttggtatggaaaagaaaaaaatctatctgttttgttctgccggtatgtccacttccctgttggtatcaaaaatgaaggcgcaggccgagaaatatgaagtgccggtgatcatcgccgcctatccggaagcgctggctgcggagaaaggcgttgaggcggatctgatcctgctggggccgcagatcgcctacaccttgccggaagtgcaaaaacagctgcccaacaaacctgtggaagtcatcgatccgctgctgtacggcaaggtcgatgggctgggcgtgctgaaggccgcggtggccgctatcaagaaagccaatcaataacaggaggccgccgtgaataccctcattgcctcgctcgagaaggttatcctgcctttcgccgtaaaaatcggtaagcagccccacgtcaacgccatcaagaatggctttatccgcctgatgccgctgaccttgaccggggcgatgttcgtgttgatcaacaacgtgttcctgagcttcggcgaaggatcgttcttctattcgctgggcgtaaggttggatgcctctaccatcgagacgctgaatagtctgaagagcatcggcggcagcgtttacaacggcacgctggggatcatgtccctgatgacgccgttctttatcagcatggcgttggcggaagagcgaaaggtcgatccgctcgcttcggcgctgctggcggtggcggcctttatgaccgtcacaccgttcaatgtcggcgaggcctatgcggtgggggccaactggttgggcggcgccaacatcatttccggtatggtgattgggctggtggtggccgagatgtttgccttcatcgtgcggcgcaactgggtgattagcctgccggacagcgtgccggcttcggtgtcgcgttccttctcggcgctgatccccggtttcatcatcctctccatcatggggctggtggcgttcgcgctggcgcactggggcaccaacttccaccagatcatcatggacggcatttcggcgccgctggccaagatgggcagcgtggtgggctgggtgtacgtactgttctcctcgctgctgtggttctttggggtgcacggttccatggcgctggcggccctggacagcggcatcatgacgccgttcgcgctggaaaacgtggagctgtacaacaaatacggttcggtcgaagcggcggtggccgccggaaaagagttccacatgtgggcgaaaccgttcgtcgactcctacatctacctcggcggcaccggctcgacgctgggcttgatcatcgccatcttcatcgcctcgcgccgcgaagattatcgccaggtcgccaaactggcgacgccatccggcatcttccagatcaacgaaccgatactgttcggcctgccggtgatcatgaacccggtgatgttcattccgttcatcctggtgcagccggtgctgaccattatcacctccctggcctactactccgggctgatcccgccgatcaccaacatcgcaccctggaccatgccggtcggcctgggggcgttcttcaacaccaacggcagcatcatggccatgttgctgagcctgttcaacctggcggtcgccaccgtgatctatctgccgttcgtggcgatctccaacaaggcgcagagccagatcgacgcggcgacggaaagcgaagaagacatcgccaaggcgctgaaattctaactgtggaacggggcggtgtggccgccccgcgagggacgcgagtatggaatatcaatttgccgacgggttctggtggggcagcgccacctccgcgccacagtctgaaggggcggccgcgcgggacggcaagagccgcaacatcttcgactattggtacgagatcgcgcccgagcgctttcacgagcgggtgggcccgaccgaagcctcgaccttttacgaccatttccgcaccgatatcgggctgctcaaaacgctgggccacaatacctttagaacgtcgatctcgtggtcgcggctgatcccggacggcgacggtgaagtgaacccgcaggcggtggcgttctataacgcgatgatcgacgagctgctggcgcagggcatcaccccgtttatcaatctctatcacttcgatatgccgctatgcatgcaacagcgcggcggttgggaaagccgggcagtggtcgaagcctatgcgcgttacgccgatacctgtttctgcctgtttggcgatcgggtcacccactggttcaccttcaacgagccgatcgtgccggttgaagccggttacctgaatgacctgcactacccttgcgtggtggacttcaaacgggcggtcaccgtggcgtatcacagcgtactggcgcacgccatggcggtgcagcgtttcagagcgcgggggctgccggggagcatcggcatcattctaaatctgagcccgacctatccgcgctccgacgcgccggaggatcggcaggcggcacacgacgccgatctgctgctcaatcgcagtttcctcgatccggtcgccaaagggcgttacccggccgcattgttgcacctgctggagcggcatgggctgatgccctactgcgaaccgcaggacgcgcagctgatcgaaggcggcgtggtggatatccttggcgtcaactattaccagccgcgcagggtgcaggcgaaagagggacggcgcaccgaggggccgatcgcatcgccggaggatttgttcagttactatgcaatgccgggccgcaaaatcaatccgcaccgcggctgggagatctatgagaaggggctgtacgacatcctgatggatctgaaagagaactacggcaatctgccctgttatatttcggaaaacggcatgggcgtcgagggcgaagaagcgtttatcggcgccgatgggcgggtggaggacgattaccgcatcgactttattcgcgagcacctgaagtggctgcaccgcgcgctggcggaaggctcgcagtgcaagggctatcatctgtggacctttatcgattgctggtcctggctgaatgcctacaagaatcgttatgggctggtgcggctggatcgggcggatcagcggcgcaccatcaaaaaaagcggttactggtttgccgaggcggccagacgcaacggatttgactaacgggaggccggcgccgtgtccgataaccgaatttcgctgagtgccaacgacgtgaagctgattcgcgagcaggatttctttaactgcaaagactttcacctgttcatctacaacaaggtggaaagcgccaccgggctgcatcagcacgactattacgagttcaccatcgtgctgagcggcaaatgctatcaggagatcaacggcaagcgggtgctgctggagcgcggggatttcgtctttatccctatcggttcctaccaccagagcttttacgagttcggcgcgacgaaaatcttcaacgtggcggtcagcaaagcgttctttgaagaacattacttgcaacagctgccgcgttgctttgtcgcctcgcaggcctacagcctgagaagcgagtttttggcctatatcgaatcggtggtgagttcgccgcagtttcgcgaggatgatttcgccgagtttctcgaaacgctgaccttctatgtgataagccgcattcgtcaccataaagaagaaaacgacggcggcgatgatatcccgcagtggctgaagaacaccctggccggcatgcatgacaaggcgatgttcggcgaaaaggcgttggcgaacatggtggcgctgtcggggaaaacccaggagtacctgacccgggcgatgcggcgctactaccagaagacgccgatgcaggtgatcaatgagatccgcatcaacttcgccaagacgcagctggaggtcaccaactattcggtctctgacatcgccttcgattccggctatggcgacgtcagcttgttcattaaaaacttcaagcggctcaccgacgtgaccccaggcaactaccgaaaaaagtgttacggccctctttagggccgctcccgatcagtatcaacgccgatatgccgatgagcttcagggcgccggtcggttaatcatttgatttttaccttaacgagggggaatgccgcgccgagcggtcggccttcccttgccaaaaatccatcccgcgggagcctctatggaaaaactactgatcgtgaatgccgatgatttcggcctgagcaaagggcagaactatggcgtcatcgaggcgtatcagcatggcgtcgtttcctccaccacgacgatggtgaacggcggcggcgcgcagcacgcggcggcgctcagccggcaatatccggggttgccgattgggctgcatttcgttttgacccatggcaagccgctgggcgccatgccttcgctggtcaacgaacatggcgaactgggcaaatggctgtggcgccgcgccgaggccggcgagctgcagctggacgaaattcacgaggagctgcagcgccagttcacgcgcttcgtgacgctgttcggccggccgccgacgcatatcgacagccaccaccatgtgcatatgcagccgcaaatttatccgctggtggaggcgttcgcgcaagcgcagggtctgccgctgcgtctcgatcgcgaagaggcgaaacggcgtggcatcacgctgcatgccccctatagcactgacgcttttgacgcgggattctacggtgagacgatttccgaaacgttgttcctgcaaaggttggcgcgcgccgacgagcagggcgcagaatcattggaaatgatgtgccacccggcgttcctcgacgcgacgatcctgcagagccaatactgccatccgcgcctcgtcgagctggatgtgttgaccgcgccgacgctgaaagcggcgatcgccgaacgcggttttctgttgggctccttccaggatctgtaacgccgccgtttacagcatggcgtgcgcctttttcaggccggtgtcttcttccggatcggcgccctgaggcaagggctccgcctcttgtgcttcgggctgcggctcgtcgacctcgggcgccgcttccggcggcggcatggtgtcgtgaatgatctgttcatcgaaggtcggattgagcgccggcgacagcggcgagctggtgaggctgtccggcagcggaatgtgcggcaccggcgcgtcctgcgccaactgcggttcctccgctttcgccgtgcggctgagggccgccagcagcacgccgcacagggcgaaaaaggcgtacaggatattgccgcccagcggctcgatcagcgcgccgaccgccaatggcccgatgctggcgccgacgccgaacgccatcagcagacaggcggccagcgagacgcggcgttccggctcgatcagatcgttggccagcgccaccgccaacgggtagagcgtaaattgcaacatgctgacgacgaacccgaccgccagcagcagcgggaaatcgatgtgcggcagcagcgccagcggcagcgccgccacgatcagaaaaatggcgttgaggcgcatcagcaacgggcgattatagcgatccgacagccaactgagcgggaactgcgccaccagcccggcgaagatggccagcgccatgaacaggccggtttgctgagtggttaaggattgcagactggcgtagaccggcgccaggccgtaaaacgagcccaccaccatgccgatcaccagcgtggtagccagcaccttgggaatggcgccgacaaagtaacgcagctccatcggggccggcgacatgtggcgcgcattggtgcgggtggtgagagcgatgggcaccagacaaagcgcgaagcacagcgcgatcaccagcagcgtgctgatgcccaggttgctttgcagcatcagcactatctgacccagcgacatgccgagataggtcgccgccatatagaagccgaacaccatgccgcgctggttggattccgcctggtcgttcagccagctttccagcaccatatactggcacatcatgcacagcccgatcaccagacgcagcgcgacccaggcgggaatgaacgccgtcagaccgtgccccagcaccgcagcggtgatgatgccggcgcaggccacgtaggcgcggatatgcccgacgcgggcgatgagaaagtggccgaccttgccgccgatcaccaacccgatgtagttggcggcgatgatggcgccgatcagcgcgctgctgacgtggatggaggccagccgcagcgagacataggtggtgagcaggcctgagcccaacagcagcaacagggtggtggtgtacaacggcaagaatacgcccaacgtttttttcacgctatcatcctaatctcttctggtgcgccctgaggccgccgccgcagcgcgccgcctccgtgatgttccttgtgctggtgcgccgccgctcaatggggcgcttcttttgatactagcagcttggccgggcgcttaaaaccgcacctcctgcgaggcgctgcgcatttctgcgcgccggccgccgcgtcgccttgataaatgctactatcgggcgcatatacctgaattcgcgagggaggggttatgagtgaaaaccaactgcgccggctcagcgtgctggcgggggaaaaactgaaggcgcagggccgctggatcacctgcgcggaatcctgcaccggcggcggcatcgccaaggccatcaccgatatcgccggcagctccgcctatttcgatcgcggtttcgtcacctacagcaatgcggcgaaacatgatctgctgggggtgagcgaagcgacgttgatggcgcacggcgcggtcagcgaagaggtggtgcgcgagatggcgataggggcgctgcgggcggcgcaggccgatctggcgctgtcggtgagcggcatcgccggcccggacggcggcagcgtggaaaagccggtcggcaccgtgtggttcggctttgccagcagcgatggccgggggctttcgcgcaagatgcaattcgagggcgaccgcgatgcggtgcggctgcaggcgacgattttcgcgctgcaaaccgccatcgacgaatttttgtaaattaggcttgatactgtatgaccatacagtataattagtgacatttcctgcacaacatacattcagtggcagtgtggggtaacaccggcattgcgaaacgaaggagcaaaaatggctattgatgagaacaagcaaaaggcgttagctgcggcactgggccagattgagaaacagttcggcaaaggctccatcatgcgcctgggtgaagaccgctccatggacgtggaaacgatctccaccggctcactgtcactcgatatcgccctgggcgccggcggcctgccgatgggccgcatcgtagaaatctacggcccggaatcgtccggtaaaaccactttgacgctgcaggtgatcgccgctgcgcagcgcgaaggcaaaacctgtgcgttcatcgacgccgaacacgcgctggatcctatctatgcgaaaaagctgggcgtcgatatcgacaacctgctgtgctcccagccggataccggcgagcaggcgctggaaatctgtgatgcgctgacccgctccggcgcggttgatgtcatcatcgtcgactccgtggcggcgctgacgccgaaggcggaaatcgaaggtgaaatcggcgattcgcacatgggcctggcggcgcgcatgatgagccaggcgatgcgtaaactggccggcaacctgaaaaacgccaataccctgctgatcttcatcaaccagatccgtatgaaaattggtgtgatgttcggcaacccggaaaccacgaccggcggtaacgccctgaagttctatgcttcggtgcgtctggatatccgtcgtatcggcgccatcaaagaaggcgacgaagtggtgggcagcgaaacccgcgtgaaagtggtgaagaacaaaatcgctgcgccgttcaaacaggctgagttccaaatcatgtacggcgaaggcatcaacagccgcggcgaactggtcgatctgggcgtgaagcacaagatgatcgaaaaagctggcgcctggtacagctataacggcgagaagattggtcagggcaaggcgaatgcctgtaacttcctgaaagaaaacccggctattgccgccgagctggataagaaactgcgcgacctgctgctgcatagcggcggtgaactggtagccgcttccggtgacgacttcgaagacgacgaagcggaaaccagcgagcagttctaatcgctgaagatgtgcgccgccgtatatgtggtgcatatcctctgaattcaggcttgaatgatgaatgacttgctaagccgcgccatgcgcctgctgtcgcaacgcgatcatagtgaagctgaactgcgccgcaaacttgcggcgcagccgtttgtggcgaaagcccggtttggcggtaaggggccacatgcgccggcatcaccgccggtggccgaagagccagtggatcctgcgctgatcgatcaggttatcgcctactgttaccagcacaactggctggatgataagcgtttcgcatacagctacatcggtagccgcagccgcaagggttatggcgcgcagcgcatccgcagcgaactgatgcaaaagggcgtggataaagcgctggtgcaggacgcgttggcggaatgcgatatcgactggtgcgaacaggcgaaacaggtggcgcagcgaaaatttggcgatgcgttgccaaccgactggaaagagaaagccaaagtgcagcgttatctgctctatcgcggcttcttccaggaagaaattcagtcaatttaccgtgattttgcgcaatgagcgcacacggggttttacttccctctgaagaaaatttatcttatccccactttttgttcgtgggctggttgtcatcgtcgggatgacgcgccaccggctcacgtgtcgttattctagcctttccaggaaaattatgagcaagagcaccgctgagatccgtcaagcgtttctcgatttctttcatagtaagggtcatcaggttgtagcaagcagctccctggtgcctaacaatgatccgacattgctgtttaccaatgccggcatgaaccaatttaaggatgttttcctggggctcgacaaacgcgcctattcccgcgccaccacctcgcagcgctgcgtgcgcgcaggcggcaagcataacgacctggaaaacgtcggttataccgctcgtcaccacaccttctttgaaatgctgggtaacttcagcttcggcgattacttcaagcacgacgcgatcagctacgcgtgggaactgctgaccggtgaaaactggttcaacctgccgaaagagagactgtgggtcaccgtgtatgaaaccgatgacgaagcattcgacatctggcagaagcaaatcggcgtaccggccgagcgcattatccgcatcggcgataacaagggcgcgcctttcgcttcagataacttctggcagatgggtgataccggcccatgcggcccgtgcaccgagattttctacgatcacggcgatcacatctggggcggccctccgggcagcccggaagaagacggcgaccgctacatcgagatctggaacatcgttttcatgcagttcaaccgtcagtccgacggcaccatgctgccgctgccgaaaccttcggtggataccggcatgggtctggagcgcatcgcggcggtgttgcagcatgtgaactccaactatgagatcgacctgttccgtaccctgatcgccgccgtagcgaaagtgaccggcgcgaccgatctggataacaaatccctgcgcgttatcgccgaccacattcgttcctgcgccttcctggtgtctgacggcgtgatcccgtctaacgaaaaccgcggctacgtgctgcgtcgtatcattcgccgcgcgatccgtcatggcaacatgctgggcgcgaaagataccttcttctacaagctggtagcgccactgatcgaagtgatgggcccggcggccgacgagctgaaacgccagcaatcgctggtggaacaggtgctgaaaaccgaagaggagcagtttgcccgcacgctggagcgtggtctggcgttgttggacgaagaactggccaagctgcagggcgatactctggacggcgaaaccgctttccgtctgtacgatacctacggtttcccggtcgatctgaccgctgacgtctgccgcgagcgtggtctgaaagtcgacgaagcgggctttgaagaagcgatggaagcgcagcgccgccgcgcgcgcgaatccagcggcttcggcaccgactacaacagcctgatccgcgtggatggcagcagccagttcagcggctacgatcacgacgagcagcaggcgacggtgatcgcgttgttccgtgacggccagccggtcgagcagatcaacgccggcgaagaggcggtggtggtgctggacgagacgccgttctacggtgaatccggcggccaggtcggcgataaaggcgtgctgaaagccgccggcgccgagtttgtggtcaatgacacccagaaatacggtcaggctatcggccaccaaggcaaactggcgcagggctcgctgaagctgaacgatcgcgtggatgcgcagatcgacgccgagcgccgcaacagcatccgcctgaaccactccgcgactcacctgctgcacgctgcgctgcgccaaacgctgggcgatcacgttgcgcagaaaggctcgctggttaacgacaaatacctgcgtttcgacttctcgcacttcgaagcgatgaagccggaacaaatccgcgcggtggaagatctggtgaaccagcaggtgcgtcgtaacctgccggtgcagaccgagctgatggcgttggaagacgccaaagagaagggcgcaatggcgttgttcggtgagaagtacgacgacaacgtgcgcgtgctgaccatgggcgacttctccaccgagctgtgcggcggcacccacgccagccgcaccggcgatatcggcctgttccgcattttgagcgagtcgggcaccgcggcgggcatccgccgtattgaagcggtgaccggcgcaggcgctatcgccacgctgcaccagcaaagcgatttgttgcaagacgttgcgcagttggtgaagggcgacagcaacaacctgaccgataaagtgcgctcggtgctcgatcgcacccgcgcgctggaaaaagaactgcagcaactgaaagatcagcaggcggcgcaggaaagcgcgtcgctgtccagccaggcgaaactggttaacggcgtgaagctgttggtcagccagttggacaatgtcgaagccaaaatgctgcgcaccatggtggatgacctgaaaaatcaattgggttcggccattatcgtgttggcgacgacggctgatgacaaagtcagcctggtcgcgggcgtgaccaaggatctgactgaccgcgtgaaagccggcgagttgatcggcaacgtggcgcagcaggtcggcggcaagggcggtggtcgcccggatatggcgatggcgggggggacggatatcaacgctctgccagcggcgttaaacagcgtagaagcctgggtggcctcaaagctgtgaacataaataaatagcacggacaaacgccataatactttgttgattatggcgttttcatactgtgctaacacaatttagttacaattgcgggaacaaagtttttctggtcggctaaacttaccattatctgaggtgggaccaagtctgcttacacttattgtggattgcgcggcttacgttttcaccacatatgatggataatgacggggaaactgagagacccgactcttttaatctttcaaggagcaaagaatgttaattctgactcgtcgagttggtgaaaccctcatgattggcgatgaggttacggtcactgtgctaggggtaaaaggcaaccaggtgcgtattggtgtgaacgcccccaaagaggtttcagttcaccgtgaagaaatctatcagcgcattcaggcagagaagtctcagcagacgacttactgattccgaagcagcgtctcgttgccagacgagacgctactgcatcgttttacccacttctttcgttctcccctctctttttcgtgattattttcccggtgagtttcctgctttattgctgcagacgttgcggttgcctgttgattaaacgccctttttgccgtgaaatcgcccatgttgggtgcgaattgtgcaaacgcgcatgagttgggaaaaattgtttgacttaaaagtcggagaaagtaatatgtgcgccacgcagtgccgatgagcttctccaaagcaagttaggcacaattcgaaagaagcgtatggtgaggtggccgagaggctgaaggcgctcccctgctaagggagtatgcggtcaaaagctgcatccggggttcgaatccccgcctcaccgccatttgcatccgtagctcagctggatagagtactcggctacgaaccgagcggtcggaggttcgaatcctcccggatgcaccatattttgcagtatggtggggtagtaacaacgtaccatacggtatcaaaaaagaattcctgtgcatccgtagctcagctggatagagtactcggctacgaaccgagcggtcggaggttcgaatcctcccggatgcaccatctaatagaagcccgccttagcgggtttttgcttttctgttattcgtgaaacagacaagcggcaaaaacagtcatgcatccgtagctcagctggatagagtactcggctacgaaccgagcggtcggaggttcgaatcctcccggatgcaccatgtttaacctcccgtatcgcgaagagaaatcgtcatgcgggtggtaaaaagaaagtgtccttggggaggataacgttgctttagcaacggcccgcagggtgaggcgttggcgccgaatcatcctcccggatacaccatctaagagaaacccgccctggcgggtttttcgcttttcagcatttagccattctctcttcccccctttcctgctttgtacccgatcgatcacagcacattccgctatgacgcagtcagcgacaacccaacggctttacgctaaagtagttttctttcctcaacgatcatggagtaacgatgtacgaccgctatcagggtcttattttcgacatggacggcacgattctggacaccgagccaacgcaccgcaaagcgtggagtgaagtgctgtcacgttatggcatgacgtttgatgaagcggctatggtggcgctgagcggttcaccgacctggcgcatcgctcaggcgattatcgccagccaccaggccgatctcgatccccatcacttggccgcggagaaaacccgcgcggtggaggcgatgctgttggacagcgtgcgcccgttgccgctgatcgaggtggtaaaatcctatcacggtcgtcgtccgatggcggtcggtaccggcagcgagcaccgcatggcggaaatgctgctgcgtcatctcggcctgttcaactgcttcgacgcgatcgtcggtgcggacgacgtacagcgccataaaccggagccggacaccttcctgcgttgcgccgaacttatcggcgtgccgccggaaaagtgcgtggtgtttgaagacgccgagttcggtattcaggcggcaaaaagcgccggtatggacgtggtagacgttcgcacgctgtgagtagtacgctagccgtaatatcgttatttggcagcagcttcctcagtgcgacgctgctgccgggaaattcagaaatcgttctggtcgctttgctgactcagagtcgcgtctcgccggaattgctggtgctggccgcgaccctgggcaacacgctgggcggcttgaccaatgtcattatcgggcgcctgttaccggcgttgaaaccacagcgggggctggcaacggcgctcgggtggctgcaacgcttcggcccggctgcgctgttgctcagctgggtgccggtggtgggcgatttgttgtgcgtgttggcaggttggctgcgcatgccctggggctctgtcgcgctgtttctgtgtatcggaaaagcgctgcgttacatcgttttggctatgataacggtacagggcatcgcctggtggcagtaaccaagtgaatataactcaatattctctcgggtgcggattcagtatgcttacgagttattgtttttagaagcgggaggtcaatttgatcccggacgtatcacaggcgctttcttggttggaagcccatcctcaggcattaaaaggcattcgtcgcggcatcgagcgtgaaacgctgcgagtcacgccgaacggcaccttggcgactaccgggcatccggaaaagctgggggcggcattgacgcatcactggatcaccacggatttcgccgaggcgctgttagagttcattacgccggttgatgacaatatcgatcacctgctgacgttcctgcgcgatattcatcgctacgtggcgcgcaacattggcgatgagcgcatgtggccgctcagcatgccgtgctttatcgaagccgagcaggatattgagctggcgcagttcggttcttcgaacatcggccgcatgaagacgctgtaccgcgaagggttgaagaatcgctatggcgcgctgatgcagaccatttccggcgtgcactacaacttctcgctgccgctggagttttggcaggcctgggctggcgtgcaggacgcagaaagtggtaaagagcagatctcggcggggtatttccgtctgatccgcaactactaccgtttcggttgggtgatcccgtatctgttcggcgcatcgccggccatttgttcttcgttcctcaaagggcgcgagaccactctgccgttcgaacgcaccgagcaggggatgtgctacctgccgtacgccacctcgctgcgtctgagcgacctgggttataccaacaagtcgcaaagtaatctgggcatcaccttcaacgatctgcacagctatgtggccggtttgaagcgggcgatcgttacgccttccgaagagttcgccaagctgggcgtgaaagagggtgatcgctacctgcagttgaacagcaacgtgctgcaaatcgagaacgagctgtatgcgccgatccggccgaagcgcgtgaccaaaagcggtgagacgccgtcagacgcgctgctgcgcggcggtatcgaatacatcgaagtgcgttcgctggatatcaacccgttctcgccgatcggcgtggatgcggtgcaggcgcgtttcctggatctgttcctggtgtggtgcgcgctggccgatgcgccggagatgagcagcgatgaactgctgtgcacgcgcaagaactggaaccgggtgattctggaagggcgcaaaccgggtcagaccatcggcatcggctgtggcgccagccatgaaccgctggaaaaagtgggcaaggcgctgttcgccgatctgcgtcgggtagcagaagtgttggacggcgaagccggcaaccgtcaataccagcaggtgtgcgatgagctggtcgccgcgtttgacgatcctgagctgactttctccgcgcgcattctgaaggcgatgaaggcggaaggcaccggacgcgtcggtctgcagctggcggagcagtatcgccagacattgctggaagaaccgttggaaatcctgaacgaagccgagctggataaagagcgggaagcctcttggcagcgtcaacgcgacatagaagccaatgatacgctaagctttgaagcgttcctgaagcaaaacggcggaagctgaaaaagaaaaaggccacatcaatgtggccaaatatgcatctctgatgacagggatgatgataacaaatgcgcgtctttcacatactcagactcgcagggttggaaaaggtttcccggttaggaaaaaaagtttcgaaataaatgctcttttacgaggaggtagcgaaatgccattgctggatagctttaccgtcgatcatacccgtatggcagccccggctgtccgcgttgcgaaaaccatgaaaacgcctcatggcgataccatcacggtatttgatctgcgcttttgccgcccgaacctggaagtgatgcccgaacgcggcattcacacgctggaacacctgttcgccggctttatgcgcgaccacctgaacggccagggcgtggagattatcgacatctccccaatgggctgtcgcaccggtttctacatgagcctgatcggcgtgccggaagagcagcgcgttgccgatgcctggaaagcggcgatggcagacgtgctgaaagtgaccgaccagcgcaagatccctgagctgaacgagtaccagtgtggtacctaccacatgcactcgctggaagaagcgcaggaaatcgccaagcacattctggataacggcgtggtggtgaaccacaacgacgaactggcgctgccgaaagagaagctgcaggagctgcatatctaaccgtacgtttcccgcagagacaaaaaagacgcgatttcgcgtcttttttacgttctggcggagggttagtgatggccgatgctggactgcagcgaggtgatcggcgtgacccgcacctgtttgatcatattgccctgcacgtcgagaatgtcgatatcgtaatggccgatacgcacccgggtgccgatttcgggtatctcttccagttcttccagcagcatgccgttgacggtgcgagcttcattggcgggtaaagtccagttaaaggccttgttcagctcccgcacgttggcggtaccgtcgatcaagaccgagccgtcgctctgcggcgtgacttcttccgccagcgtcggcgacattgaggtggtgaagtcgccgacgatctcctcgaggatgtcttccaccgtaaccaggccctgaatgtcgccgtactcgtcgaccacgatgccgaccttctctttgttgcgctggaacttcaccagctgcacgttgagcggcgtgccttccggtacgaagtagatctcatcggcggcgcgcagcaggttctctttgttgaactcttttttctcggtcatcaggcgataggcttcgcgcacgcgcagcatgccgatcgcgtcgtccagcgagctgcgatacagcacgatgcggccgtgcggcgaatgggtcagctggcgcatgatcgacttccagtcgtcgttgacgtcgatgccgacgatctcggtgcgcggcaccatgatgtcgttgaccgtcaccttttccaggtccagcaccgagatcagcatgtcctgattgcggcgggagatctgcgactgggattcacgcacgatggtgcgcagctcatccttgctgacggcgtcgctgatgcgcacgttggtgcggataccgaacaggcgcaaggtcaggctggtgatgccgttgagcagccagaccagcgggaacatcaccttttgcaacggggccagcaggacgctgctggggaaggcgatgcgttccggatagagcgcggcgaaggttttcggcagcacttcagcgaacagcagcacggcgaaggtcagcacgccggtcgcaatcgccacgccgagatcgccatacagccgcatgccgacgatggtcgccagcgccgaggcgaggatgttgaccaggttgttgccgatcagcaccaggccaatcagccgatccggtttttgcagcagcttctccacccggcgcgccgaacggttaccctgcttggacaggtggcgcaggcgataacggttgagcgtcatcatgccggtttcggaggcggagaagtaagcggagaccacgatcatgatcaccaggataatgatgagggtccccgtcgacacatgctccaatgcagtattccttatagagagggaaagttgaaccgggctggctcagcgcaccatcacctgttgaatcagacggctgccgaagtaggcgagcgtcagcaggaaggcgccggcgaagctgaaccagacgacgcggcggccgcgccagccttcatggtaatggccccacagcaacacgatatacacgaaccaggccatgatcgacaacacggctttatgcacgttctctttgctgaacagattatccatgtacagcaggccggtgcacagggtgagcgtcagcagcaccacgccgatctgggtgatatggaacatcttgcgctcgatgctcatcagcggcggcatgtcggcgctgaaggtcagctttttgtttttcaacaggtagtcgagccaggcgagctgtaaggcgtagagcgcggcgatgataagggtggcgtaagagaacagcgccaggccgatatgcaccatcaattccgggctggcttccaggtgagtgatgaactcgccgggcatgaagctggcgaaggccagattgatcatcgcgaaactgtagacgatcggcagcaggaaccagccgcgatcgcgtgaagcgacgaaggtcatcaccgaacagatgatcaggctgacgatagaaccaatgttcagcaggctgagattctgcccggcgctgacgtcaaagatgcgctgctgcagcgcgatggcgtggcaaatcaacgccaccaccgccgagacgagggcgagccgacggtatgcgctgttcttccgcaacaagctgggaatgatcagtccaaggctgagcaggtaggccatcaaagccacaatggagaaaactggcataacgtttaattttgcttcggcgtggttaattggagtgtcagtatagcgttgcgcgcgtttcactccaacctatctccaacgctgaggcagagatcctgcgcgcttcgtgttatcatcggcgcaattgtgtcgccggagcggcctgtcattacacgttgagcatgagacgatgtttgaaaatttaaccgatcgattgtcgcgcacgttgcgcaatatcagcggccgcgggcggctgaccgaagagaatatcaaggaaaccctgcgtgaagtgcgtatggcattgctggaagcggacgttgcgctgccggtggtgcgcgacttcatcaaccgcgtcaaagagagcgcggttggccatgaagtcaacaaaagcctgacgccggggcaggagttcgtcaagatcgtcaagggcgagctgatcgccgcgatgggcgaagtcaacaccgagctgaatctggcggcccagccgccggcggtggtgctgatggcgggcctgcagggggccggtaaaacgaccagcgtcggtaagctcggcaagttcctgaaagaaaaacagaagaagaaagtgttggtggtttccgcggacgtttatcgcccggcggcgatcaaacagctggaaaccttggcggaaggcgtcggcatcgacttcttcccgtctgacgtcaaagaaaaaccgatcgacatcgtcaatcgcgcgctgcaacaggccaagctgaagttctacgatgtccttattgtcgataccgccggccgcttgcacgttgacgaagcgatgatggacgagatcaaacaggtgcacgcggccatcaagccggtggaaaccctgttcgtggtcgacgccatgaccggccaggacgccgccaataccgccaaggcgtttaacgaagcgctgccgctgaccggcgtggtgctgaccaaggtcgacggcgatgcgcgcggcggtgccgcgttgtccatccgccatatcaccggcaagccgatcaagttcctcggcgtcggcgagaagaccgaagcgctggagccgttttacccggatcgcgtggcatcgcgcatcctgggcatgggcgacgtgctgtcgctgatcgaagatatcgaaagcaaggttgaccgcgagcaggcggagaagctggccaacaagctgaagaagggcgacggtttcgatctgaccgacttcctggagcagctcaagcagatgcgcaacatgggcggcatggccaatatgctgagcaagctgccgggcgccggccaactgccggacaacgtcaagtcgcagatggacgacaaagtgctggtgcgcatggaggcgatcatcaactcgatgacgctgaaagagcgcgccaaaccggaaatcatcaagggctcgcgcaagcgccgcatcgcgatgggggccggcatgcaggtgcaggacgtcaaccgcttgctgaagcagttcgacgaaatgcagcgtatgatgaagaagatgaaaaaaggcggtatggcgaagatgatgcgtggcatgaaaggtatgatgccgccgggcttcccaggccgctgacgggcctccgcacgccgagtgcgggcgctttcagcattcgccgttcgcggtgaaaaccgcccgaaatttgacaggctgcaaaagttgtcccctgcgatcgacgctttagattgctttttgcgccaaaatgagtaaaattttcgggctttttatattgcaaccgggccccgtccctcaatggggcccggctgttttattaactaaagaggatgttatggtaacaattcgtttggcacgtggcggcgctaaaaagcgtccgttctatcaagtagtagtgaccgacagccgcaacgctcgtgatggtcgtttcatcgagcgcgtaggcttcttcaacccgatcgcttccggtcaggctgaagcactgcgtctggacctggaccgcatcgagcactgggttggtctgggtgcaaccgtttctgatcgcgttcacgcgctgatcaaagacgctaagaaagcagcttaatctgtcgcggtggtggcaatgagcaagcaactcaaaccggtagcgcctaagcagccgattgtactcggtaaaatgggttccgcttacggcattcgtggttggctcagagtgttttcatccaccgagaacgccgaaagcatttttgactatcagccgtggtttatccagcaggcgggtcagtggcagcatatcgagttggaagactggaagcgccacagtcaggatctgatcatcaaagtcaaaggcattgacgatcgggacgcggcgaatctgctgactaatcgcgagattatggtggattccgatcaacttcctccgttggagggtgatgattactactggaaagacctgatgggctgccaggtagtcacctccgccggctacgagctgggtaaagtcatcgatatgatggaaaccggctcgaacgatgtgatggttgtgaaagcgaacctgaaagatgcgttcggcatgaaggagcggttgattccgtttcttcatgggcaggttatcaagaaagtcgatctcactgctcgcgtgattgaggcagattgggatcctggtttttgacccccggatcaaacggtcgaagcaagtggaataacggtaaggggattggcttgtgttcatcggtattgtaagcctgtttcctgagatgttccgcgctatcaccgattacggggtgactggccgggcagtaaaaaatggcctgctgagcgtgcagtgttggagtccgcgcgacttcacctacgaccggcatcgtaccgtggacgatcgcccttacggcggcggcccgggaatgctgatgatggtgcaacctttacgggaagccattcatgcggcgaaagcagcggcaggcgagggagcaaaggtgatttatctgtcacctcaggggcgcaagctggatcaaactggcgtgtgcgaactggcggccaatcagaagatgattctggtgtgcggccgttacgaagggatagacgagcgcgtaatccaaaccgaaattgacgaagaatggtcaatcggcgattacgttctcagcggcggggaactgccggcgatgaccctgattgattcagtcgcccgtttcataccgggtgtgctgggccatcaggcctcagcggaggaagactccttcgccgacggattgctggactgcccgcactatacccgccccgaggtgttggaagggatggaggtaccgccggttctgctgtcgggcaaccatgccgagatacgtcgctggcgcttaaagcagtcgctgggccgaacctggcttagaagacctgaacttctagaaagcctagctctgactgacgagcaagcggtgttgctggctgagttccaacgggaacatcaggccaggcaacaggactatgaaggaaacgtctgacatcagacgggaccgatatatcagtttacctagggtaagagacatattatgagcaacattattaagcaacttgaacaagagcagatgaaacaagacgtacctgcattccgtccgggtgattccgtggaagtgaaggtatgggtcgttgaaggtagcaaaaaacgtctgcaggcattcgagggcgtggttatcgctatccgtaaccgcggtctgcactctgcattcactgttcgtaagatttccaacggcgaaggtgttgagcgcgtattccagactcactccccagtaatcgacagcattactgttaaacgtcgtggtgccgttcgtaaagctaaactgtactacctgcgtgaacgtactggtaaggctgctcgtatcaaagagcgtctgaaccgcgttaactaacgctgcatccaaaagttaatagttatcaggggttggcctatgccaacccctttttttatcttaaaacctcgacatgttgcatttgcgagatttcgtctgcgcaccgccaacataataaagcctgcataagcaggctttttgcattacagcgctgcggcgctgtgtttctgctgactctccggcgggtgaggctgagccgggataatgtcatcgacaggtttgacgatcacccgcgcgacggactcgtgtgtggcgaatgtgcagctgcaattgatgttgcggcattgatggtaacgctctttggtcgactcgctcagatagcggctggagcgagtgtgggccacgtgaccgcatagtggacagtgcatcataagaacccccttgaacaaattaagtgaaattggtgtggcatcacctttggcgagcgaactcgtcatcatgaggcaatgccctgcaagcacagtgcgcgttccatggcgcgtcgctgttccagccctttgtttttctttccgtttacgtaaacccagcgtggcagctgatcgcaggcctgccgccactggcgctgttgcagcagcgcgactagcgtagagtggcaggctgcgctgacgcccacattgaaggcgaaggcgatcgccgcatcataggtttgttgcgagagcgtatccggcaggcaggcggccatgccgcgctcggtgcggcgaacatcgtcgaccaaatccatcgcggctttgtgttcatcaatcgctttaccagggatgacgccagcggtgtgcccaatgccctgcgtccacaccccggcgctgcactggtacggcgacaggcggcaaccttcgagatcggcgatcagcctgaggccggcttctgaggtttgcagctcgccaaatgacggcaacagcacggcgatggccaaaacggcggcgacgctgcagcgcttaacggttgcactcatcgtaaattttcctccgcgatgtcgcattgcgctcaatggccttcaagatctgcaggcttttacgtcggtagtaccagttcaccagaaacgtgccgatgcctaccgccgcaccgactaaaaaggcaatgtcctgcggagacagcttgccgagccaggcgagaaacagcgccatggcgtaggtgatgaatgaggttattttctccatagcattatgctcgcttcgtttacagaatctcgggagccggaggcatcaatgtgagacagcttgctatcgatatccatcatgctcctggtctgtatgataatcactgtatatgcatacagtattaagctatttgctaaagtcgtcaatgggtgaggtgaatatttttagcagattgtgcaaaagagggagggggcggcataaaaaaagcccatcgatgatgggcttcgagaaataatggggggagattacaggccgtagaccagcgtgaccgaggtggtggtatctgtgttcttcggcgctgaggccggcggtttgctgttgtaggtcacggtgtaagcaacgcgcaatgagaagcgatcgttgatcgccacgttcaacgcgctttccgagttcagcgtggtttcttcgttcgccagcgcggaaacgccctgaatgaacttggtgttgtcggtcaactgataggaatagttggccgcaccataggccagccccttggtcgagcggccgccgccatggtattcgtcatggcgcacgccgggaccgaattccacccgcaggtcactgagcggcccgttaaggagttgacggccgtagccgccggtcagcgtggagcgtgaatcgtaaccgttgaaacggtcactcagccagctggcctgaccgaacaggtagttgcgatcggtcaggttatagcgcgtacggccaccggcctggtatttttcggacgagcgcacgttggaggaggtggtgttgttggccgccccccacaggctgtacgccgcgtcgctgttgaaccaggtcatgttggtgttggccaacagggtggagctctgcgagttgcctgactgggcgttgtagcccgcctgcacgttgccttcgaacggtttcttggcggtggccggatcgtccatcgcggtgaaaagcgtattgtcggcaagggctgaaacactggtgaaagtcgttaagcagcaaatatacagcggaaaagcgcgacgagcgcgagaagagagcatcttggatccagttgttaaggggagttattgttgatgacggtcacattatatcggttcatttcggcgacaaaaatagccgccattagcttaagtttttaatttttatccctcatttattcgcttttcttctacttaaaatcatcgcttttggcggcatttcgtgctgatcctgcttcgcactggcgtcggtgccgagatcggcggcgtattttcgctgtaaaactagatgtacagatttatttacgaatgttcgtttttcttagaccgggtggctaatgtggggggacgggctttgtgatttattaatgtcatgtatttattgtgttttaattgttttttacaagcctttttcagatgtgatttaatcgggatgattacggtaattttttatttacgggaaatggattgaaaactttacatatcgtgatagggtagagccctgaaacgctcaatgttccatttcaacgcataacgccaaacgacaggaatagcatcatgcaaaaagacgcgctcaataacgtacacatcagtgcagaacaggttctcatcacgccggaggagctgaaaaaccagttcccgctcagcgccgacgacgaaaatgagatcgccactgcgcgcaacactatcgccaacattttgcaggggcgcgatcatcgcctgttggtggtgtgcgggccttgttcgatccacgatccggacgcggcgctggactatgcccgtcgtttgaaaaccctggcggctgacttgagcgatcagctgtatatcgttatgcgcgtctactttgaaaaacccagaaccactgtcggctggaaaggtttgatcaacgatccgtacatggacggttcgtttgacgttgaggcaggcttgcatatcgcgcgtcgcctgttgctggatctggtgggcatgggcttgccgttggctaccgaagcgttggatccgaacagcccgcagtacctgggggacttgttcagctggtcggcgatcggtgcgcgcaccaccgaatctcagacccaccgagaaatggcctccggcctgtcgatgccggtcggcttcaaaaacggcaccgacggcagcttgggtaccgccatcaacgccatgcgcgccgccgctatgccgcaccgcttcgtcggcatcaaccaggcaggccaggtttgcctgctgcagacgcagggcaacccggacggacacgtgatcctgcgcggcggcaaaacgccgaactacagtgctgagcacgtcgcggcctgtgaaaaacagatgcttgaggcgggactccacccgtccttgatgatagattgcagccatggaaactcgaataaagactatcgccgtcagccggcggtggccgagtccgtggtggagcagatcaaggcgggcaaccgctcaatcaccggcattatgctggagagccatctgcatgagggcaaccagtcttccgaacagccgcgtgcagacatgcgttacggtgtgtccgtcaccgacgcctgcatcaactgggagagcacggaaaccctgttgcgccatatgcatcaggaactcggcgctgcgctggcggcccgtacgggagaaaagtaagttatggtggcagaactgaccgcgctgcgcgatcaaatcgatgaggtggataaagcgctgctgggtctgctggcgaaacgcctgcatctggtagcggaagtgggcgaagtcaaaagccgtcatggcctgccggtttacgtaccggagcgcgaagccgcgatgctggcctcgcgtcgccaggaggcggaaaacctcggggtgccgccggatttgatcgaggacgttttgcgccgcgtgatgcgcgaatcctacgtcagcgagaacgataaaggctttaaaactttgtgtccgcagctgcggccgatcgtcatcatcggcggcaacggccagatgggaaggctgttcagccgcttgctgacgctgtcgggttatcaggtcagggtactggatcaggaagattggccgcaggcggaacagctgctggcagacgccggcatggtgatcgtcagcgtgccgatccacgtgaccgagcaggtgataagccgcctgccgacgctgcctgccgactgtattctggtggatttggcgtcggtgaagaaccgcccgctgcatgcgatgttggcggcgcacagtggcccagtggtagggctgcacccgatgttcggcccggacgtgggcagcgtggcgaagcaggtggtggtttactgcgacggccgccagccggaggcttaccagtggctgcttgaacagctgcaggtgtggggcgcgcggctgcatcgcatcagcgcggtcgaacacgatcagaacatggcgtttattcaggcgctgcgccacttcgccaccttcgcctacgggttgcatctggcggaagagaacgtgcaactggagcagttgctggcgctctcctcgccgatctaccggctggagctggcgatggttggccgcctgtttgcgcaggatccgcagctttacgccgatatcatcatgtcgtcggaggaaaacgtggcgctgattaaacgttactaccagcgcttcggcgaggcgataacgctgttggagcatggcgacaaacaggcgtttatcgacagtttccgcaaggtggagcactggttcggcgattacgcccaacgcttcctggtggagagccgcacgctgttgcggcaggctaacgacagccggcagtaaaacgcgggcggtaaacgtaaaaggttcggcttggccgaacctttttttatggtttcaggatgggttgaccggcaccacggtgtcgctcgggtagcagcccaggaccttcagcgagcgggtgattggcgccagatcgcgcagcgctttttgcatcgcgtcggcacgcagattggcctgcacatcgatataaaacatctcttcccacggattgccgttgatcgggcgtgattccagtttggtcatgatgatgccgttgtcgcgcagaaccagcagcgcttcgaccagcgcgccggattgttggccggtcgccatgatcagcgtggttttggccggcacctgttcagatacgtcgatcgctttgcgcgccaggacgatgaagcgagtgatgttctgctgctggttggcgaggttgtgttccagcacctgcagcccgtacaacgcgccgccggcctcactgcccagcgccgccaccttcggcgaattcagcttggcgactttctccatcgccgcggcggtgctttcggtgtactcgattttccagtgcgggaagcggttaaggaactggctgcactgttggaacggctgcgggtggctgtagacggtttcaatctggcccaggtcgctgtcgccggccaccagaacacagtggtcgatcgggttggtcagttcgccgacgatcgacaggctggtgtgttgcagcagatcgtacacttcgttaatcgagccggagctggtgttctcgatcggcagaatggcatagtccgcctggccggtttccacctgggcgaagatatcctgaaacttttggcagccgcattcgatcagccgatcgaaatggcgggcagcgtattggcgtgccgccagatgcgaataagagcctttcgggccgagaaaggcgatgcgggcggagtgttggctgacggggttgagctggtgctgcagcagcgcctgctgggtcagtacggaatcttcgataatcagttgaaacagacgggtgacgtagaagccgtccaggtcgtaaggtttggcggcggcgatcagcgcatccagcagatcgcgttcgcgctctttgtcgcggatcgggcggtgagagtgcagcttggtcttgccgacttcgatcgccagctcacggcgttccgccagcagggccaacagtttcaagtccagtgcgctgatgcgctcgcgcagcaccaataacgggttgtcagtcataatcagcttccgccttctgttcttattcgttgtaaaacagccataaaaaaagccccctgtctccaggaggccttgttgttcgtcttcgcattctttctcacacgacgaaacgcctcccagtcaggggaaggtaaaaaagaatgcgaagaaaaacggtgtgcgtggcatggtctacctaaggttaatgtgaacaggttttaaagtaaccgctggcctttagcccgtcaacaaaaatacccgacaaaaaacgcgccctcgggcgcgtttgatgcggcaatcgctgtcggacggttattcctgctcttgcgtgacttccggcacgatgtctttcacgctggcgttgcagcggcgcgcttcgcctttgtgctgcactttgttcagctggcgctccagcttggcgatcagctcattaacggcggtatacatgtcatcatgtttggcgctggcgaccagcgggccgttaggcgtggtaatggtagcatcggcgacaaacccctgcggttctttggataagacgatatgcgggttaatcagctgggtctgccatttttccagtttggtgagacggtcttcgacgtgattgcggattgcgggagtgatatccatttgtttgctggtaatgttcaatgtcatataacttacctctctgtctttccgtcttggtgaatccagcataccccgctttttgtttaaatgcgtgatgtaaatcacgattttttgtcactttttgcaaagttagttcaatctgtgattcagcatttgaattggctatctaatgcttgagagttgccgccggatggcgcattatcgatgagttgaccggtgaggagtactagctaacaccgtgtttttacttgtgtatttttccagtgaaaaccaggtcgacgccaatgaaaacggcagcctcggctgccgtttggtttttctgccgttgccgacgcgcgcttattgcgggttggcggcgatcactttggccactttgtcagcctggccgttcagctgcagctgcttgtaggcattttccatcagcggcaacacgtcgtgcgtcgctttggtatccgggaattcacgcaacatctgctcggcgcgattaacgaccgcgacgtaagcaccgcgtttagtgtagtattccgccaccgaaagctcatgcttggccaaacggtctttcagatacaccaaacgcttgttggcgtcggtcgcgtattggctgttcgggtattgctgaatcaactggctgaagtcgcggaacgcagcgcgagcgtgctgaggatcgcggtccgaacggtcaaccccgaagaagccctgcagcgcgctgtcatcgagcgccatgtcggtcaggccgcgcatgtacatcacgtaatcgatgttcgggtgcgtcgggttcagacgcatgaagcgatcgatggatgcctgagccatcggcaagtcggcggccttatagtaggcgtaaatcaaatccagctggacctgctgggaatacggcccgaaaggatagcggttatctaacgcttcgagttgcgtaatcgcgcccttgaagttaccgtcctgcagtttttgctgcgcggtagcatagatttccgaaggtgggttgtcgggaaccgcatccttggatgtggagcaacctgccagcgccaggctcaacgtggctgccgccaccagatatttcatacgcgtcatgacgttttgattatcctcagggtgttattccgggagactgtccgttaagctcccgacaaagaccaggtacaatagcacattatattaaacggcatcgccgtgaaaacccaacgttaacgaagaagctgcatatggcacaacaagtacaactcaccgcaacggtggccgaatctcaactcggacaacgtttagatcaggctttggccgaattgttccctgattattcacgatctcgcataaaagagtggatcctgggcgatcgggtgaaggtcaatggcaaaacgtcaaacaaaccgaaagagaaggtgctgggcggagagaccgtcgccatcgatgcacagattgaagaagaggcgcgttgggaaccacaggatatcgcgctggatatcgtctatgaagacagcgacatcctggtgattaacaaaccgcgcgatttggtggtgcaccctggcgccggtaacccggacggcacggtgctcaatgcgctgctgcatcactacccggaaattgccgacgtgccgcgtgccggcatcgtgcaccgtctggacaaagacaccaccggcctgatggtggtggcgaaaaccgtgccggcgcaaacccggctggtggaagcgctgcaggcgcgtgagatcacccgtgaatacgaagcggtggcgatcggcaccatgaccgccggcggcacggtagaagagcctatcgcgcgtcattccaccaagcgtacccatatggcggtgcacccgatgggtaaaccggcggtaacgcactaccgcatcatggaacacttccgcgcgcacacccgcctgcgcctgcgcctggaaaccggccgtactcaccagatccgcgtgcacatggcttacatcagccatccgctggtgggcgatccgctgtacggcggccgtccgcgtccaccaaagggcgcttcggaagccttcatcaacacgctgcgcggctttgaccgccaggcgctgcacgccaccatgctgcgtttgtatcatccgatcagcggcatccagatggagtggcatgcgccgctgccgcaggacatggtcgatctgatcaacgcgctgaaggcggacaccgaagaattcaaagatcagatggactggtaatgagctcgctcattctgcctgactggccgttgcctaccggggttaaggcctgcagcaccacgcgtggcggcggcgttagcctgccgccttatgactcgttgaacctcggcacccacgtcggtgatgaggcgcaagcggtgacacgcaatcgggaacgtttggttaccgccgccggtttgccgcagatgccggtgtggctcgagcaggtgcacggcactcgcgtggtgacgttgacggggaaagcgcccgccgatctgcgggcggatgcggtgtacagcaatgtgccggggcaggtgtgcgccgtgatgacggcggattgtctgccggtgctattctgctcgcagcacggtgacgaagtggctgccgcccacgccggctggcgcgggttatgccacggtgtgctggagcaaaccgtggcggcgttcagcgccgcgccgggtcagatcagcgcctggttggggccggcgatcggcccacagcagtttgaggtcgggccggaagtgcgcgccgctttcatggcggaagacgccgaagccgcggcggcgtttacgccgcacggcgataagtttttggctaatatctatttgctggctcgccaacgtttgttgcgagcgggcgtgcaggccatctatggcggcgaccgctgtacggttaacgaaacgagtcattttttctcctatcggcgcgatggaataaccggacgtatggcaagtttaatctggctgatataacctattgaattaggacgatccaacgacgcatggcgttgtaccgaaaatttagcgtcgagataaccttgaaaatttgagggatgacctcatttaatctccagtagcaatttcgacccatcttggaggtgttatgcgtctggatcgtcttactaacaaattccagcttgccctcgccgatgcccagtcactagcccttgggcacgacaaccagtttattgaaccgctacatctgatgagcgccctgctcaatcaggaagggggcacggttcgtccactattaacttccgcaggtatcgatgccgggcgcgtgcgcaccgaaatcgaacaggcgctgtcccgtttaccgcaggtagaaggcaccggtggcgacgttcaaccgtcccacgagctggtgcgcgtcctgaacctgtgcgacaagctggcgcagaagcgcgcggataaattcatttcttccgagctgtttgtgcttgcggtgctggaagaccgcggctcgttgaccgacttgttgaaagcggccggcgcaacggccgacaaaatcagcaaagccattgaacaaatgagaggcggtgacagcgtggaagaccaaggcgccgaagaccaacggcaagcattgaagaaatataccatcgatctgaccgaacgtgccgagcagggcaaacttgacccggtgattggccgtgacgaagagatccgccgcaccattcaggtgctgcaacgccgcaccaaaaacaacccggtacttatcggcgaacctggcgtgggtaaaaccgctatcgtcgaaggcctggcgcagcgcatcatcaacggcgaagtgccggaagggttgaagcacaagcgcgtattgtccctcgatatgggcgctttgatcgccggcgccaaatatcgcggcgagtttgaagagcgtctgaaaggcgtgctcaacgatctggccaagcaggaaggcagcgtgatcctgtttatcgacgaactgcacaccatggtcggcgccggtaaggcggatggcgcaatggatgcgggcaacatgctcaaaccggcgctggcgcgcggcgagctgcactgcgtcggtgccaccacgctggatgagtatcgtcaatatatagagaaggatgcggccctcgaacgtcgtttccagaaagtgtatgtggcggagccgagcgtggaagacactatcgctattctgcgcggcctgaaagagcgttacgaactgcaccaccacgtgcagatcaccgatccggccatcgtggcggcggcaacgctttcgcaccgttatatcgccgatcgtcaattgccggacaaggctattgacctgatcgacgaagcggcgtccagcattcgcatgcagatggactccaagcctgaatcgctcgacaggcttgagcgccgcatcattcagttgaagctggaacagcaggcgctgaataaagagtcggacgacgccagtaagaaacgcctggaaatgctcagcgatgagctggggcagaaagaacgcgaatattcggagctggaagaagagtggaaagcggaaaaagcgtcactctccggtactcagaacatcaaggcggaactcgagcaggccaaaatcaccctggagcaggcgcgccgcgtcggcgatttggggcggatgtcggaactgcagtacggcaagatccctgagctggagaaacagctcgccgctgccacgcaggccgaaggcaagagcatgaagctgctgcgcaaccgggtaaccgatgcggagattgccgaagtgctggcgcgcgcgaccgggatcccggtggccagaatgctggaaggcgagcgcgacaagctgctgcgcctggagcaagagctgcattcgcgggtgatcggccaggacgaagcggtcagcgcggtctctaatgctatccgccgcagccgcgccgggttgtccgatcctaaccggccgatcggttcgttcctgttccttggcccgaccggggtggggaaaaccgagctttgcaaggcgctggcttcgttcctgttcgacagcgacgacgccatggtgcgtatcgacatgtccgagtttatggagaaacactccgtttctcgtctggtcggcgcgcctccgggctatgtcggttatgaagagggcggctacctgacggaagccgtacgtcgtcggccttattcggtgatcctgctggatgaagtcgagaaagcgcacccagacgtgtttaacatcctgctgcaggtgttggatgacggccgcctgaccgatggccagggccgtaccgtcgatttccgcaataccgtggtgatcatgacgtccaacctgggttcggatctgatccaggagcatttcggtcagatgaactacgcgcagatgaaagagtcggtgatggagatggtgagtcaccacttccgtccggaattcatcaaccgtatcgatgaagtggtggtgttccatccgctgggcgagaaacacattgctgcgatcgccaagattcagctgtcgcgtctgtacaagcgtttggaagagcgcggttacgaagtaaccatgaccgagcctgctctggcattgttgagcaaaaccggttacgaccctgtgtatggtgcgcgtccgttgaaacgcgctattcagcaggagatcgagaacccgttggcgcagcaaatcctgtccggcaagctgatccccggcaagctggtgacgctggatgtggaaaacgaccatatcgttgcacgccaataacggcaattaagcctattaaagatgaaagggagcgggtgaccgctccctttttttatcttcttctttatctttgtttgtccctatttacagaggttgccgctattactgtgctaaaaccggtgtttttcgactaataaatatcctaaaaaggcgtttttggtgattatttgagcgcttgaaaagttttttgcaattaggggttgcggctcgccgagaactccctataatgcgcctccactgaccgggaacaacgactgacaagccgccgggtcagcgagaagaaagcgaaataaacgcttgactctccgggcgaaaagcgtagtatacgcagcccgcgccgatgaagtttctcggcactgctctttaacaatttatcagacaatctgtgtgggcactccacaagacgatatccagcatcttcggatgcaaaaaatatcaagtcttgaagagtgactaactgaagtaaaattcatgcagtaaatctttgagcatcgcttctcgagtggaagcaaatcaagcttttaattgaagagtttgatcatggctcagattgaacgctggcggcaggcttaacacatgcaagtcgagcggtagcacaggggagcttgctccctgggtgacgagcggcggacgggtgagtaatgtctgggaaactgcctgatggagggggataactactggaaacggtagctaataccgcataacgtcgcaagaccaaagagggggaccttcgggcctcttgccatcagatgtgcccagatgggattagctagtaggtggggtaatggctcacctaggcgacgatccctagctggtctgagaggatgaccagccacactggaactgagacacggtccagactcctacgggaggcagcagtggggaatattgcacaatgggcgcaagcctgatgcagccatgccgcgtgtgtgaagaaggccttcgggttgtaaagcactttcagcgaggaggaaggtggtgaacttaatacgttcatcaattgacgttactcgcagaagaagcaccggctaactccgtgccagcagccgcggtaatacggagggtgcaagcgttaatcggaattactgggcgtaaagcgcacgcaggcggtttgttaagtcagatgtgaaatccccgggctcaacctgggaactgcatttgaaactggcaagctagagtctcgtagaggggggtagaattccaggtgtagcggtgaaatgcgtagagatctggaggaataccggtggcgaaggcggccccctggacgaagactgacgctcaggtgcgaaagcgtggggagcaaacaggattagataccctggtagtccacgctgtaaacgatgtcgatttggaggttgtgcccttgaggcgtggcttccggagctaacgcgttaaatcgaccgcctggggagtacggccgcaaggttaaaactcaaatgaattgacgggggcccgcacaagcggtggagcatgtggtttaattcgatgcaacgcgaagaaccttacctactcttgacatccagagaacttagcagagatgctttggtgccttcgggaactctgagacaggtgctgcatggctgtcgtcagctcgtgttgtgaaatgttgggttaagtcccgcaacgagcgcaacccttatcctttgttgccagcggttcggccgggaactcaaaggagactgccagtgataaactggaggaaggtggggatgacgtcaagtcatcatggcccttacgagtagggctacacacgtgctacaatggcgtatacaaagagaagcgacctcgcgagagcaagcggacctcataaagtacgtcgtagtccggattggagtctgcaactcgactccatgaagtcggaatcgctagtaatcgtagatcagaatgctacggtgaatacgttcccgggccttgtacacaccgcccgtcacaccatgggagtgggttgcaaaagaagtaggtagcttaaccttcgggagggcgcttaccactttgtgattcatgactggggtgaagtcgtaacaaggtaaccgtaggggaacctgcggttggatcacctccttacctaaagatattagttcgcgtggcgtgctcacacagattgtctgatgaaaaagtaacgagcaaaagcgtcataaaagtacggtgtcgtgtccccttcgtctagaggcctaggacaccgccctttcacggcggtaacaggggttcgaatcccctaggggacgccaagcttccgacccacccggtgaaagcggcggtcttcagtatctgacgatacaccatatcttaaagatgacttccgagtcatgtttaagatattgctctttaacaatctggaacaagctgaaaattgaaacatgacggctgaaatttgtccctccgtagaagtactgggataaagagtaacctgtcatagagtctctcaaatgtttgcagcacgaacgatggaaacatcttcgggttgtgaggttaagtgactaagcgtacacggtggatgcctaggcagtcagaggcgatgaagggcgtgctaatctgcgaaaagcgtcggtaaggtgatatgaaccgttataaccggcgatacccgaatggggaaacccagtgtgtttcgacacactatcatgtcatgaatacatagtggcatgaggcgaaccgggggaactgaaacatctaagtaccccgaggaaaagaaatcaaccgagattcccccagtagcggcgagcgaacggggaggagcccagaacctgaatcggcttgtgtgttagtggaagcgtctggaaagtcgcgcagtaaagggtgatagccccgtacactaaaatgcacaggtcgtgagttcgatgagtagggcgggacacgtgacatcctgtctgaatatggggggaccatcctccaaggctaaatactcctgactgaccgatagtgaaccagtaccgtgagggaaaggcgaaaagaaccccggcgaggggagtgaaatagaacctgaaaccgtgtacgtacaagcagtgggagcaccttcgtggtgtgactgcgtaccttttgtataatgggtcagcgacttatattttgtagcaaggttaaccgtataggggagccgtagggaaaccgagtcttaactgggcgattagttgcaaggtatagacccgaaacccggtgatctagccatgggcaggttgaaggttgggtaacactaactggaggaccgaaccgactaatgttgaaaaattagcggatgacttgtggctgggggtgaaaggccaatcaaaccgggagatagctggttctccccgaaagctatttaggtagcgcctcgtgaactcatcttcgggggtagagcactgtttcggctagggggccatcccggcttaccaaaccgatgcaaactccgaataccgaagaatgttatcacgggagacacacggcgggtgctaacgtccgtcgtgaagagggaaacaacccagaccgccagctaaggtcccaaagtcatggttaagtgggaaacgatgtgggaaggcatagacagccaggatgttggcttagaagcagccatcatttaaagaaagcgtaatagctcactggtcgagtcggcctgcgcggaagatgtaacggggctaaaccatgcaccgaagctgcggcagcgacgcttaggcgttgttgggtaggggagcgttctgtaagccgttgaaggtggcctgtgagggttgctggaggtatcagaagtgcgaatgctgacataagtaacgataaagcgggtgaaaagcccgctcgccggaagaccaagggttcctgtccaacgttaatcggggcagggtgagtcgacccctaaggcgaggctgaaaagcgtagtcgatgggaaacaggttaatattcctgtacttggtgttactgcgaaggggggacggagaaggctaggctggccgggcgacggttgtcccggtttaagcgtgtagggggtgtgacctggtaaatccggttgcatattaaccctgaggcgtgatgacgatgcactacggtgcagaagtagttgatgccctgcttccaggaaaatcctctaagctccaggtaacattaaatcgtaccccaaaccgacacaggtggtcaggtagagaataccaaggcgcttgagagaactcgggtgaaggaactaggcaaaatggtgccgtaacttcgggagaaggcacgctggcatgtaggtgaagtccctcgcggatggagctgaagccagtcgaagataccagctggctgcaactgtttaataaaaacacagcactgtgcaaacacgaaagtggacgtatacggtgtgacgcctgcccggtgctggaaggttaattgatggggtcagccgcaaggcgaagctcttgatcgaagccccagtaaacggcggccgtaactataacggtcctaaggtagcgaaattccttgtcgggtaagttccgacctgcacgaatggcgtaatgatggccaggctgtctccacccgagactcagtgaaattgaactcgctgtgaagatgcagtgtacccgcggcaagacggaaagaccccgtgaacctttactatagcttgacactgaacattgagccttgatgtgtaggataggtgggaggctttgaagcgtggacgccagtctgcgtggagccatccttgaaataccaccctttaatgtttgatgttctaactcggccccgtgatccggggtgaggacagtgtctggtgggtagtttgactggggcggtctcctcccaaagagtaacggaggagcacgaaggttagctaatcacggtcggacatcgtgaggttagtgcaaaggcataagctagcttgactgcgagagtgacggctcgagcaggtacgaaagtaggtcttagtgatccggtggttctgaatggaagggccatcgctcaacggataaaaggtactccggggataacaggctgataccgcccaagagttcatatcgacggcggtgtttggcacctcgatgtcggctcatcacatcctggggctgaagtaggtcccaagggtatggctgttcgccatttaaagtggtacgcgagctgggtttagaacgtcgtgagacagttcggtccctatctgccgtgggcgttggaagattgagaggggttgctcctagtacgagaggaccggagtgaacgcaccgctggtgttcgggttgtcatgccaatggcattgcccggtagctaagtgcggaaaagataagcgctgaaagcatctaagcgcgaaacttgcctcaagatgagtcttccctgggcctttaaggcccctgaaggaacgtttaagactaagacgttgataggctgggtgtgtaagtgcagcgatgcattgagctaaccagtactaatgatccgtgaggcttaaccttacaacaccgaaggtgttttggtgagaccaagacaatattcagcttgtttacagattggattgacaggcttcagcgatgaagcgggttgattaaaacgaatttgcctggcggcaatagcgcggtggtcccacctgaccccatgccgaactcagaagtgaaacgccgtagcgccgatggtagtgtggggtctccccatgcgagagtaggacactgccaggcatcaaataaacgttatcagtgtgacgactggtaatgcgcaagtcgcagagcgcgatattgccggtatcgaaagatacaacgtaaaagaatcggtggagcggtagttcagttggttagaatacctgcctgtcacgcagggggtcgcgggttcgagccccgtccgttccgccacttaattgataagccctgagtttcgactcagggctttttcatatctgtattttgcgcttttcagtctggaattgttcctctttaccgcctcgcctttctccatattattgcctttagatcaaaagtcttatgccgaactaggcgtttttgatcaataaaaaagttgccataatcttcctcataccacatctacctgttaatgagagaaaacattatgagcatccctgcatttggtttaggtactttccgccttcaggatcaggttgttatcgattctgtcagcactgcacttgagctgggctatcgcactatcgacaccgcgcagatctatgaaaacgaagcggctgttggccaggctatcgctgccagcggcgtgaaacgtgaagacctgttcatcaccaccaagatttggatcgcgaatctggcgaaaggcacactgatcccaagcctgcaagaaagcttgaaaaaactgcaaacctcctacgttgatctgacactgatccactggccgtcacccaacgacgaagtgccagttgccgaatttatggctgagttgctggaagcgaaaaagctggggctgactcgccaaattggcgtatctaacttcaccatcgacttgatgcagcaagcgattgacgcgattggcgccgatgaaatcgccaccaaccaaatcgagctgtcaccgttcttgcagaaccgcaaggtggtagaattcgcgcagcagcacggcatcgccatcacctcttacatgacgttggcctatggcaaagcgctgcaggatgaaacgattaaaagcatcgccgctcgtcacaatgcaactccagcacaggttgtcctggcttgggcattgaagctgggttatgcagttattccttcctcgaccaaacgtgaaaacctggcgagcaacctgttggcacagcaactgacgctgaccgacgaagatatggcgcagatcgccgcactggagtgcaacggccgtctggttagcccggaaggcctggcgccaaactgggattaatctttcctcgcagtggtcagcataaggcgtccatcagggcgcctttttatcgtttcaggtattcactcacaaaatcaataaagctgcgcagacggttgctgacggcgctgtcgctgtaataaaccgcgttgatcggcatggcgaccggcagtgtcgcttccaccagaatcggaaccaaatctccacgtttgatatcttcgtcactcataaagtccgacaggcaggcgataccgttgccatgcagacagagatggcgctgggtttctccactattagtggtcaagccgggagtgatttccaactggctgccatctgaacaagccagtggccagcggttcaaactgggcaggtcgttgaagccgatgcagcagtgatgtgcaagatcttctaccgttagcggcgtgccgtgctgagccagataggcgggggaggcgagcacatgccggtagctggtcatcagtttgcgcgctttcagcgtggaatcggtcagctctcctacgcggatcgcaatatccacttttcgctcgatcaaattgataaagttttccgaagacactagcgataacgacatttcaggataacgttcgcggaactccgccactaaaggcgtcagcatgtgtagcaccaccggcgttgccgcgtcgacgcgcagcaggccttgcgggcgttgacggctttccatcagcgcattttctgccgcggccatatcgttcagtaccttctgcacctggcgaaagtaattctctccttcctgagtcaggctgatttggcgcgtggtgcggttgagcagcgttacgcccagtttgctttccagttttttcaccgttcggctaaccacggaattcgcttgttccaggcgttcagccgcccggctgaaactgccgctttccacgacggtgacaaaggtgatcagctcgtctgagtttgctttcatttttgctccaatggcaaagttaatttgaaattttgagcatttttatcatttaagcataggccgataatagccgtcatcaacttgaatgctatttcggagtaaaaaatgccactcgcattacttgccttaaccatcagcgcttttgctatcggcacgaccgagttcgtgattgtcgggttgattccgactatcgcggagcagttgggagtgaccgtaccgtccgctgggttgctggtgactatctatgccctcggcgtggccatcggcgcgccggtgctgacggccctgaccagccgcataccgcgcaaactgttgctggttggcctgatggtgctgttcactctcggcaacctgctggcctggcagtcacccagttatgaatcgctggtagtggctcggttgttgaccggcctggcgcacggcgtgttcttctctatcggttccactatcgccactagcctggtggcgaaagagaaggcggcctccgccatcgccatcatgtttggtggcctgacggtggcgctggtgaccggcgtaccgctggggacgttcatcggccagcagtttggctggcgtgagaccttcctggccgtttctctgattggcgctgtcgccacactggccagcattattttggtgccgagcaatatcaagaaccagggcagcgccggcgtgcgggaacagctgaaagtgctgactcatcctcgtctgctgctgatttacgcgattaccgcattgggatacggcggggtcttcacgacctttaccttccttgcgccgatgatgcaggaactggccggcttctctgctccgaccgtgagctggatactgttggcttatggcgtcgcggtggcggtgggtaacatctggggaggcaagctggccgatcgtcatggggccgtgcgtgcgttgagctttatctttgccgcgctggccgttttgttgctggtgttccagtttaccgccagccacagtattgccgctttgctgacggtgattgtgatgggcgtgttcgctttcggcaacgtgccggggctgcaggtgtatgtggtgcagaaagccgcgcaatacacgccaaatgcggtggatgtggcgtccggtctcaacatcgcggcgttcaacatcggcattgcgctcggctcggtgataggcggccagactgttgcttcactggggctggcgcagaccccctggattggcgcgctgatcgtggtggttgcattgttgctggttagcctcagtggccgcctggataaaaagtctcagctgcaaacggcttaattcgtaaaacccttgctgcctggcccgcgttttgcgggccttttcgcatttttcacctattacccctcacctttacacagctataccgtcagaagattgaaatcgctgcaggcggcccctataactgaaaaggtgatgcccgcaaaagccatgccctctatgcagggtaggcgtataatcaattcatcgttggcgagtgttcatcgccagttttcatgttaatgggtaataggcgaatcgcgtgccgaaacgaacttatgcaatgaggtatgttgcaggtcagccagttgagcgaatctttcctggcgccgttaaccagccgttgccgccaggggcggcgctgccgacgaccggcgccttgcgcgttatggtgtggaatattttcaaacagcagcgagccgactggctttcggtgctgaaaaaccatggcaaagacgcgcagctggtattgttgcaagaggcgcaaaccacgccagagttggtgagctacgctaccgccaactatctggcggccgatcaggtgccggcctttgtgctaccgcagcacccttccggcgtgatgacgctggcggccgctcatcctgtttactgttgcccgctgcgcgagcgagagccgctgctgcggctgtccaagtcggccctgatcaccgtttatccgctgtacaacggcgagctgttgatggtggtgaacatccatgcggtgaactttagcctgggcgtcgacgtctacagcaagcagttggggccgataggcgaacagatcgccagtcaccgggggccggtgattatggcgggggatttcaacgcctggagccgcaagcgcatcaatgcgctgtatgactttgccggagagatggcgctgcgcgaggtgagcttcaccgacgaccatcgccgcaaggccttcgggcgtccactggatttcgtattttaccgcaatctgggggtggtggaggcgtcggtgctggtgaccagcgcgtcggatcacaacccgctgttggtggagtttcatccggagaaagactcaccggtatggtgaatcgcagctaataaaaaagcaccccgaagggtgcttttttgtgccgaacacttaagtatccggcgttagcttgttgccgacaaacagggtcagcttcagacctggctgcaggttgcctttggcgagcgttgaattccaacgcatcacgtcgttaatatcgacgccgtgacgacgtgcgatactggcgagcgaatcacctttacgaacctggtaggtgatactgctgttactgccagtattgctggccacttgcagggtttgcccaacttttatggcgctcttggcgcgtaagttgttccaactctgcaaatcgctggtcttaacgttcagccgcttggcaatgcccgataaggtgtcgccggagcgcactttatacgaactgccaccggtcaaaccgctgttcttcgccaactgcgtcgttggctgagtcacggcgatctggccatcggccagcgagtctttcagttgctcggcatgtcctttgggaaccatgatgtaatggggcccgttgggtgccgtaacgccttttttgtagcctgggttatacgctttcatcttggtgactgaaagccctgccatctcagccgcctgagtcagctggatctgctgtccgacatcgatacgcgccagcgcacgggtttcatccgttttcgggagtttcacgccgtacttcttgctgttcttgatgatgtcgctcagcgccagcattttcgggacatagattgacgtttcacgcggaagcgacaatgcccagaaattggttggcttaccctggcgtttgtttgccttcaccgcttgcatcacgcggccttcaccactgttataggcggctacggtcagtaaccagtcgccgttaaacatgcggttcaagcgctgcatcatgttaagcgcagcggttgtcgaggcgacgacatcgcgtcggccgtcataccactgattgtttttcaaaccataattgcgacccgtttgcggcacgatttgccatagccctgcggcgttggcacttgacgtggcgtgtgggtcaaaagcgctctccactatgggtagcagtaccagttccatcggcatattacgtttcttaatctgcccgactatccagtacatgtacggctctgcccgtaatgttacatcgtggagatagctcttactttttaagtactttcttttctgatcacggatccgggaattttccggaacctccatcttcagctcgtcgctaatgaagttccacaggtcctgttgcgcggcgggactgttgttatccaaccaccgcgccgagctcgctcggccatttgctgtgtactctcctgcttcaccatcttgaccagccgaagacaaactctgtgcatgctgttctggcgccggtgcgtcctgcctggacgactggcaacccactagcaagactgaggcgagaaatatcgctttagccttcatgtgtgtgtcaatgtagttgcttaaaagacgagcaataatactttgcttcgccaaataacacaactaaaagcttagaagttatctttccgcaggcgtaattcggaaaaaactgaatgaaggcttttcggtggtgaattaaagcctaatttcttttgtaaatcagtgtcatggcaacgtaaaaacaggttaattttgcgctctaattgcaatgtagtcggcacgctggcttggccttttgcccttaacgcttcaacatgttgttgatatgtttcaatctctcgatcttccggcaaaatagcccgcgcaaacttaagatttgaaagagtatattcatgcgcgcagcaaattaaggtgttatcgggaagttgcgcgagttgttgaaatgagtcgtacatttgtttggcggtgccttcaaacagcctgccgcagccggcggagaaaatggtgtcgccgcagaacagataaggggcactatagaatgccacatggcccagcgtatggccgggaacggcgatagtcctgtattgacggccatcgatatcaaaggtgtcgccgtcatggacgatgtggttggcgcctttgtccgcggtttcctgcggcccatagacggccaggccggggtactgcgcgacaatctgcgccacgccgccgacgtgatcgtgatgatggtgagtcagcaggatcgccgccggcgccagctgcaggcgctgcaacgcttcaagtaccggctgcgcttcacccggatcgacgataatgcagcgcccctgtcggtcatccaataaccaaatgtaattgtcctggaaggcgggaatgctgataagattcatggtgtacctctcgttggcaacggcttgaaagaagataataaatcatgaaaccagcccatactctacaaaagctcaccggcccgcagtcctgggctgagctgccgtggggggagtactatcgtgaagcgctcgagcggcagttgcaaccctggtggcccaagctgttcggtttccatctgctgaagatgggcatgctcagcgccgagctggccacggataaatgcgcaatctcccatcaggttaacgtagggttggagggggaagggctgcaggtggtcgccgacgcttatcaactgccgtttgccgccaagtcggtagatgcctgcctgttggcacatacgctgtcctatgcggacgatccgcaccgcatgctgcgtgaggtggacagggtgttgatcgacgacggctggttggtcatcagcagtttcaatccgttcagcctgctggggttgggcaagctggcgcccgggttgcgtcgtcgccagccctatgtcagccgcatgtttacccagatgcggctgctggattggctcagcctgctgaattacgaggtgttgcaccaggcgcgttttcacgtactgccgtggcaccgcaagggcggcaaatttttatgcacccatttgccggcgctgggctgcatgagcgtgattgtggcgcgtaagcgcaccttgccgctgacgcccacgccgatgaaactgggggcgagaaagccgtctctcagccgcgcggtgggcgcgaccaagagctatcgcaagctgccttaggcttccggttggtaaccgacgtcttcctgcgtcggtttaccggccgcttcgcgcgccagcacgtcacaacgttcgttctccggatggccggcgtggcccttgacccattcccacttcacctcgtggcgctgaatggcctgatccagccgctgccacagatcgacatttttgaccggttttttgtcggcggttttccaaccgcgtttcttccagttatggatccagctggtgatgccctggcgcacgtactggctgtcggtgctgagcgtcacggcgcagggcacggtcagcgcttccagcgccacgatcgccgccatcatttccatgcggttattggtggtcagacggaatccttcgctgaaggttttttccgtctgcttatagcgtagtatcgcgccgtagccaccggggccggggttgccaaggcaggagccgtcggtgaaaatttctacctgtttgagcatctctggtagactcttcctatcagttttataaaagccaagtctgacataaacgagcgctgtgagcactgcaatatgatctctacaaccaccagacagattgtcctcgataccgaaaccaccggtatgaacaagcttggggtgcactacgaagggcaccgcatcatcgaaatcggtgcggtggaggtgattaaccgccgcctgaccgggcgcaacttccacgtatacatcaagccggatcggctggtggatccggaagcctacggcgtacacggcatcagcgacgacttcctggccgacaagccgaccttcgatcaggttgccgaggaattcctcgactttatccgcggcggcgagctggtgatccataacgcggcgttcgatatcggctttatggatcacgaattccgcatgttgcagcagggcatcccgaagaccgagaccttctgcaccatcaccgacagcctgttgatggcgcgtcgcctgttcccgggcaagcgcaacaacctcgatgccttgtgcagccgttatgagatagacaacagcaagcgtacgctgcacggcgcattgctcgatgccgagatcctggcggaagtttatctggcgatgaccggcggtcagacctcgatagcgttccagatggagggggatacccagcaaaatgacgccgcgcaagaaatacaacgcattgtccgcccggcgacggcgatgaaagtggtctacgccagcgacgaagaagtgaaggcgcatgaggcgcgtctggatctggtggcgaagaagggcggtagctgcctgtggcgcggggcgccggcggaataacggcgtttttgcgtgaaaaaacctcactggatgaatcttcgttgaaaaactgtgcaaacggttcatttgcggagaaaaaggcgttgacggaaccgagaggcgtccgtaatatgcgcctcgttcccccgcaagagggaatggcgcggagcggtagttcagttggttagaatacctgcctgtcacgcagggggtcgcgggttcgagccccgtccgttccgccactattcagaagccctgagttagcgataactcagggcttcgtcgtttccgttctctgaaaaacggcgtggcccaatgaacggggccggcagaccggccccttatcctcagaataacaccgaatagttcaagccgaaggtgcgtccgcggcctttatagctgtacagctcaggcgatccgtaggtcgggctgtacaggatcggcgcgcgttggccccaaacggtggtgtattccttgtccagcaagttttccacgctgaagctgattttccctaccggtagggtatagctgccgaggaaatcgagggtgttgtagccatcgattttgcggccctgggtggaattggccttggtgtaatcgccatcgtccgacacgtcgaaggtttgctgcgactgtaaacgcagattccagtcgcccggcgcccagccgacataagcggtgactttcgatgggctggcggtatcgactaccagcttcttccattcgccgttgaccttggtttcggagcggataacgttgaagttggtgccggcgttccagtcgctgtcttcaaagaagtagtccaccgccccttccagcccatagatgcgccgcttatccgcattgacgttaatggtcatgtcggttttgttgatggcgatgctcttgtcggacagcgagtagtaggcggcgatttgcgtgcgcaggttatcgccggtatagcgccagcccagctcgtaggcattgaccttgatgccttccagcttggaatcgccgacgttaacgctcttcagcaactggtaatgtccgccgttcaacgcgtaggtgccgttaccgtaatatttgcccggatccgggatctcaaagccctgagagaagttgaaccaggtttgctggcgctcggtcaggtgtgccaacaggccggcattgaacagcgcgttgttgtagtcggttttcccgcccggtatagcgtcggcggacgtcgcggcgccggtggcgattgcctgctgctggttataaccgacgaagtcatcaatcttgttttcggtgtactgataacgcacgccgccgctcagggtgaagatcgggttgatgtcgtagctggcctgcaggaacgacgccaggttgctggtggtatagctcgggtagcggccggtgctgtaagcgttctccagcgtcatgccgcccgactgctgagccttcgccaggttgaagaactgctggttggcgttgaagctttcatgctcggcgtcaatgccgtaagtcagcgtcagtgcgtcgacaggtttgctgtttaacgtcagcttgccaccgtagaaatcggttttttgctgcgaagcgccaatgctgctgacgtaatagttcggtgctttgcccgccagcgtcgggaacgggtagaaggtcaacgtttcgtcgcggtagtagacctgcgccaccagatcctggccgaggaaatctgtgttggaatattgcaggttgatcaggtggcgctcggtgccggggatgcggtcggaatttaagttaccgctgttatatgccttggcgttgccggtcaccgccgcaaagttctctcccaggaacaggccgtgatcgccgtcggattggcttttgtagtattgggtggtcagctgcagctgttgatgatcgtcgatgttgagggtgccggtgcccatcacgtcgaggcgatcggaatactgcaggccggtttgggtattgtcgatcaatacctcattgcctttgccgtcataccagccgccatagcgctggtaagaaacggacaggcgcccagagacgttgtcgttgccgccgctgaccgccgccgccacgttctcgtcgtgatcgttatggccgccaaagccggttttaccgccgacctgcaactcgacctgctgttcctgttgtccttttttggtgacgatattgatcaggccgccggtgctgccgccgccgtacagcgaggtcgcgccggaaatcacctcgatatgatcgatattgaatggatcgatcgaatccaactggcggctgtcgctgcgcgatgaattcaggcgcacgccgtcaatcatcaccatcattgagcggccgcgcatattcataccatagttggtgcggccctggccgctgacgtccatgccggggatcagctgcgccaacatgtccttgatctctttgccgccctgaacctgctgttcgatctcctggctttcgatcacccaggtggtttgcgccatttccgccgtgctgcggtgtgaacggctggcggagaccaccatctgctcttcggcgccggctttctgaccttctgcccaagccgtcggcgcaagcatcgccagcagacaaggattcaaaacccaaaggtgtttgcgtttcatcgttatttatttcccaggtgatattgttattgcgttatttttgagaatgattcttttatcaataacgtttcttgttatcaataaaatcatgatatgattttttgcgatacattaacgtaattaattagttttattaacattttacccgctgcgcgatcgagcaacccacaccgtcaacacggcagccgatcggccataggtgcaagcgacagccgttgccggagaaacgagaacatgtccgccagctacagaatttttgatatcaccttgaaaagcaaaacgctgatttcaccttcgctggtgcgctgcgtgtttgaaggtgcggatattcatcggatgaagttggaagcgccggatcagcgcatcaaactgctgttcccggcggcggacggccagatcccgcagttggccaatagcccggactggtatggcgattacatggcgatccccaaagagcggcgcccggtgatgcgcacttatacgctgcgtgcgctgcgccgtgagcagaatcagatggacgtcgagttcgtgctgcatggcgtgaacggcccggcctccgcctgggcgactcacgccgagccgggtgatgccattcagaccgtcgcccccaacgctgacttcgacggcgacagcggcggctacgaatgggcgccgccggcgcagttgcagcaggcgctgttgatcgccgatgaaacggccgtgccggcggcgatgggcattctggagcaattggcgcagcagaccaatccgccgcgcgtgcaggcattcttcgaagtgccgcaggcgggggattgcctggatttgacccgcttcccgttcgccgaggtttactggctgccgcgcgatgtgggccgccagttggcgcatggcacgttgctggcggaagcggtgcgccagcgggtggatattcccgcttcggcgtgcgcgcaagcgcagtctttggcggaaagcagcctgagcgatgaggtgttgtgggagcgggcggcgggcggcagcgctttctatgcctgggtggcggccgagtcttcggcggtgaaaaccctgcggcgttatctgatcggcgaacgcgatctggaccgcgctaccgttaactttatggcctattggtgctgaatgcgccgcccttttccggcgacgctgccggagaggggctggccgcggttatttcccatcaacgaataatcgcttgccagcgggtagttcggccgtgctatgttccgctgaaacaaaggttacagcgagaacgataatgcaacggttcgacgaacgtctgcgccgcgactacccacagctgaccccgcaggagcagcgggtggccgacttcatcttcgatcactatgacgatttgatcggctacaacagcgccgagctggcgcgcctgagcggcgtttccaaagccacggtcagccgcttgttcaaacggctgggctaccccaactaccgcgccatgcgcgatgagctgcgcaccctgcgccagagcggcatgccgctgaccgatagccgcgatgcggtgcagggcgatacgctgttggcgcggcactataagcaggaaatggccaatctcacccgttgggtaaagcagatcgatgccgaacagttcagtgcgactatcgccgcgctggcgcgggcgcgcggcgtgatgctgttggggctgcgcaacagctatccggtggcgatgcacctgcgtcagcaactgatgcaggtgcgtgaacaggtgctgctggcgccgcagccggggcagacgctggcggaagatctggcggggctgacaccgcaggacatggcggtggtggtggcgttccgccgccggccgcgccagataaaggcggtgttgacgctgttgcaaagccgcggggtgccgacgctgctgatctgcgaaccgcaggcgcaggcgctgttttcgttggccagctggcagttgaccgtgccgctcgacagcgtgtcggccttcgacagctatgccgccgccatgagcctggccagtttgctcagcaatgcgttgctgcatgagaggctggcgcaggggcgacagcgcattcatcacgtcgctgaactgttccagacgctggacgaactggagctgcgttaagcacggcagatcatattccttccttccccctccgccgtttaaggcggatcggtcacctcatggtgttactttggtttcattaattgatcataagaatcttttgtttcaactgaatccctatcgggagtaggctgttgggcagcaaacaaacgtcatgtcgacgctgaaggcataactcaataacttactaagctgacagggaatgaacatgttggatatctcgcaattcgatcagattaacccgccggcgcgcctgctgatggggccggggccgatcaacgccgatccgcgcgtgctgcgcgccatgtcgagccagctgatcggccagtacgatccggcgatgaccggttacatgaatcaggtcatggcgctgtatcgcgcgctgttccgcaccgaaaaccgctggacgatgctggtggacggcacctcgcgcgccggcatcgaagcgctgctggtttccgccattcgcccgggcgataaggtgctggtgccggtatttggccgcttcggacatctgctgtgcgagatcgcccgccgttgccgtgccgaggtgcatacgatcgaggtaccgtggggtgaggtgttcagcgccgatcgcatcgaagacgcgattaagcgggtgcgtccgcgcctgctgctgacggtgcagggcgacacgtccaccaccatgctgcagccgctgcatgagctgggtgatatctgccgccgccacggcgtgctgttttacaccgatgcgaccgcttccttcggcggcaacccgctggagaccgacgcctgggggctggatgcggtctctgccgggctgcagaagtgcctgggcggcccctccggcagttcaccggtcaccctcagcccgcagtttgaagagatcgtgcgccgccgtaaatgcgtggagcaggggatccgcaccgccgagcacgccgacggcgacgacgagatgatctactccaactatttcgacatcggcatgatcatggattattggggaccggagcgcctcaatcaccataccgaagccaccagcatgctgttcgcggcgcgggaatgtgcgcgggtgatcctcgaagaagggctggagcacgccatcgcccgccaccggctgcacggcgcggcgctgctggcgggcatccggggcatggggctggcggtattcggcgatcttgaacaccgcatgaataacgtgctcggcgtgatgatcccgccgcaggtacatggcgaacaggtgcggcagatgatgctgaacgacttcgccatcgagatcggcacctcgttcggcccgctgcagggaaaaatctggcgcatcggcaccatgggctacaacgcgcgcaaggattgcgtgctgcaaacgctggcggcgctggaggcggtgttgaaccgcctcggtttcgccagcaggcagggcgaggcattgcaggccgcctggaacgtttatgatgcgggacatcatggatgacgccgctggaggcgcagcaggccgccgtacgagtgatggcgcgctgtgacgagctggcggcgatcagcgcggagcccgatcggctcacgcgcctttatctttctgcggaacatcggcgcgccaaccggctggttggcgaatggatgcgcgagagcggcatggcggtttggcaggacagcgtcggcaatatctgcggccgctatgaaggtttaacgcccggcgcccccgcgctgctgctcggttcgcatctggacacggtgcgtaacgccgggcgctatgacggcatgctcggcgtgcttacggcgctggaagtggtggcgcgctatcaccgccaggggcgccgattgccgttggcgctggaggtgatcggttttgcggatgaagagggggcgcgcttcggcgtgacgctgctgggcagccgcggcctgaccggccagtggcctgcagagtggctggtgcgtaccgatgccgacggcgttagcatcgcgcaggcgatgcgtgacttcgggctggatccggcggcgattctacaggcgcgccgtgcgccacacgacatccgcgcctattttgagctgcatatcgaacagggcccgtgcctggaggcggccgacctggcgctgggggtggtgacggcgatcaacggcgcgcgtcggcttaactgtgtctttagcggggaggcgggccacgccggcacggtgccgatggggcagcgcaaagatgcgttggcggccgcggcggaatggatgatggcggtagaaaccctgacctgcgccgccgatccgcacctggtggccaccgtgggctgcatcgagagcctgccgggcgcggtcaacgtgatccccggcgaggtgcgcttgacgctcgacgtgcgcggcccgcaggatgcaccgctggcgacgctattgacggcgttgctggcgcaggcgcaagcgatctgcgcgcggcgcggagtgcgcttcgccagcgaggcgttttatcgcatcgacgccaccgcctgcgatagcgatctgcagcgccgctggcaggcggccgtcgagcaggtacaggggcagagtctggcgctgccgagcggtgccggacacgacgccatcgccgtggcggcgcactggccggtcggcatgctgtttgtgcgttgcgccggtggcgtcagccatcatccggccgaagcggtgcggcaggcggacgtggcgctggcgatccaggcctattgcctgatgatcgccggctgggagagtgtttgatcagtcaagacgcagaaagctgtcggcgtcgcgccaggccgggaaggcgctgcggtaactctgcaggctttccagcgacagctcggcgtccagccgcgcggctgcgccgggctccgcatccgccaggatctcgccctgcgggctgatgatcaggctgtctccgctgtagttcaggccgttggcatcttcgcccacccggttgcagcccgctacatacacctgattttcaatcgcccgcgccgccagcagcgtttgccaatggcggctgcgcggcgccggccagttggcgacgtacagcgccagatcgtaatcctgctgatagcgcgcccagaccgggaaacgcaggtcgtagcagatctgcggcaggatgcgccagccgcgccactcgaagatttcacgccggttgccggcctggtagtgcaggtgttcgccggccatgcggaacagatggcgtttgtcataggcatgcacctggccgcccggctccaccagcaggaagcgattgaccgcgccttcggcggttttcagcgccacgctgccgccgatcaacgcgtggcttttcaccgcccagccgtgcagccagtcgatcacctgctgttcgggcagggcgctctcgccggcatccatggcaaaaccggtggtgaacatttccggcaagacgatgagatcgcgcccgacgatcggcgccagcaacgcgtcgaaggcggccaggttagcaaggccgtcgcgccagaccagcggttgctgcaacagggtaatttttaaagtcgacataaccgctccgcagctgcatccagcgtggcgtcctgcttagcgaagcacagccggatcaatttatgagggaaaggatcggcacagaagaccgacagcggaatggccgccacgcccacgtgctcagttaaccaatggcagaacgccacatcgtccagatcggagatggcgctgtagtccgccagcaagaagtatgtaccggcgcagggtaaaatttccagtcggctgctcgccagcgcctgcacaaagcgatcgcgcttggcgcgatagaacgccggcagctgtcgccagtgctccggttcggtgcgcaggctatccgccagcgccagctgcgccggagtattgaccgaaaaggtcaggtattgatgcaccttgcgcacctcggcgctcagcgtggtgggcgccacgcagtaacccactttccagccggtcatgtggaaggttttaccgaaggaggacaccgcgatcgcccgttggcgcaattgcgggtgggccaatacgctggcgtggccgcctttggcgaagcagatgtgttcgtagacttcgtcactgagcacgtagatctcgcgttcggcgatggcgtgccacagctgctgcatgtcttccgcctgccaggcggtggcggacggattgtgcggcgtattgactatcaccaggcgggtgcgcggcgacagcgcggcggcgaaccgttgccaatccacggcaaacgcgggcggctgcagggcgaggcgtttgagtacgccgccggccagcgtcaccgccggcgcgtagctgtcgtagctcggatcgaaacagaccacctcatcgccggggcgaaccagcgccgtgatggcggcgaacagcgcttcggtagcgccggcggtgacggtcacttcggcggtggcgtccggctgccagccatacagctcggcggttttgtcggcgatggcttcgcgcagcgccgccacgccggtcatcggtgcatactggttggcgccctgggcgacatgccaggccaggcgtgctttcaggtagtccggcccgtcgaaatcggggaagccctgcgacaggttgatcgcctgatgctgctgcgccagcgcgctcatctgggtgaagatggtggtgcccagggcaggcagtttactttcgggaatcaatgcggaagtgctcatagcaggtgaatactccaggcgcttatattgccgtcaatataacacgatgctagtatttggcaatcaagacgcttagatggctaaatgagaaaaagtgcttagcctgtcgcgcagccggctaagcctcacctgctgaccgctataccgaacgggaaacgataacaatgacggagaatccgcaacttaccgcattactggcggcctgccactggattggcgacaaaggctggtgtccggcgaccggcggcaacatgtcgttgcgcctcgacgaacgccagtgcctggttaccgagtccggcaaagacaaaggcagcctgagcgccgccgattttctgcgggtggatattgctgacaatcatgtgccgagcggccgtacgccgtcggcggaaaccgggctgcatacgctgctctatcgcttgtacccgcaccttggcgcggtgctgcatacccattccgtcaacgccaccgtgttgtcgcgggtggaacgcggcgatgcgttggtgctgcaggggtacgaaatgcaaaagtcgctcgccggccagcgcagccacctggacagcgtggcgatccccattttcgataacgatcaggacattccccggctggcgtcgcgcgtggcggcctatgccgaagtcacgccgctgcagtacggttttctggtgcgcggccacggtctctattgctggggaagccaggtggcggaagcccgccgccatctcgaagggctggaattcctgttccagtgtgaactgcaacgtcgcttgctggaggcgaaatgatccgcgctatcgtgaccgatattgaaggcaccaccagcgatattcgcttcgtgcatcaggtgctgtttccctatgcccgtgaacggctggtggattttgttcgccgtcacgccacggagagcgaagtcgccgcgccgctggcggcgctgcgcgctgaaattgaccagccacaggcggatctcgacgcgctgatcgccgcgctgtaccgctttatggatgaagaccgcaaatccaccgcgctcaaggcgctgcagggcatcatctggcgtagcggctatcgcgaaggggatttccgcgggcatctgtacccggaggtcgcggggcagctggccgcctggcagcgtcaggggctgcagctttacgtctattcctccggttcggtggaggcgcagaagctgctgttcggccacagcgacgccggcgatctgcagccgctgtttagcggctatttcgacacgcacgtcggcgccaagcgtgaaaccgcgtcgtaccgcaacattgcgcaggctatcggcatcgcgcccgacgaactgctgttcctgtccgatatccaccaggagctggacgcggcgcaggccgccggctggcatacctgccagctgatccgcgatgaggcggacgcacaaagccggcatccacaggtcagccgttttgatcacatcgatttaggggagtttgtctcatgagtggattgaccattttcagtgatacagcgccgcagcagccgctgtggcagagccgcgacgcgcaggaaatccagcgccagctggcgcagatcggcgtgcgctttgagcgttggcaggcggatcgcgagctgggcgacaatccgcagccggaggcggtgatcgccgcctaccagcatgagatcgaccggctggtggcggaaaagggctaccagagctgggacgtgatcagcatgcgaccggaccacgaacagcgccaggcgctgcgtgaaaaattcctgtccgaacatacgcacggcgaagatgaagtgcgctttttcgttgaaggggcggggctgttttgcctgcatctggacggcaagatcttccagatcctgtgcgaaaagaacgatctgatctcagtgccggccaacacccgtcactggttcgatatgggctcggcgccgcactttaccgcgatccgggtgttcgacaacccggaaggctgggtggcgcatttcaccggcgacaagatcgccgatgcctatccgcgtctggactgatcgttaaccggcgggcgttaacccagcgtccgccggaagatccccgcttcaacctgttgcggcgtgatcacgccgctgtcgaacacccacccgctgatgagttttgccggcgtgacgtcgaacgccggattgtagaccggcgcctcggccggcgcccactggcaggcgccgaagctgcctgaaacgccggtgacttcggccgccgcgcgttgctcgatcgggatggcggcgccgtccggacagtgcggatcgtgggtggtatgcggggcagccacgtaaaatggaatgccatggtagtgcgccagcaccgccaggctgtaagtgccaatcttgttggcgacgtcgccgttggcggcgatgcgatccgcgccgacccacaccgcatcgacctggccctgcgccatcaggctggcggccatcgaatcgcagatcaggcgatagggaatgcccagctcgcccagttcccaggcggtcagacggccgccctgcagcagcggccgggtttcatcgacccatacctgttgcaccttgccctgctggtgggcgcgcagcagcacgccgatggcggtgccgacgccggcggtggccaacccgccggtattgcagtgggtcagcaggcggctgccgggcttgaccagaccagcgccgcgatcggcgatgcgatcgcacagcaggcgatcttcctccaccaaccgcagcgcttcgttcaccatcgccggcgcccagtcagactccgccagcgcccgcttcatgcgatccagattgttcatcaggttaaccgccgtcgggcgggcggcgcgcagcgtgtgcagcgcctgctccagctcggcgcgcggcagaccgcgctccgccagcagcgccaacaacaggctggcggacagcccgatcagcggtgcgccgcgcacccgcaggctgtgaatgtgcccgaccaactcctccacgctgtcgcaagcgcgccaccgcttttcctgcggcagggcttgctgatcgaggatccaaaggcggttgtcctgcagggtcaaactggtggtgttaagcgcttgcatcggcggttaattccttgttgcgaggttattgcatctgaaacgctattctgccaacatgacttccagatgtatagacgtccaaatgcttttacgtctaaataaacagaatcgctgagggcagcgagagagaacagaggggttggggaatgtcgctttatcgtacgtttacggctgccgatgccgttgaatacgcccgccaatacgggcaggtggccgatccgcaggcgctggtcagcgccgacgagatcggcgacggcaacctgaacctggtgttcaagatccgcgatcgcgaaggcgtgagccgggtgatcgtcaaacaggcgctgccctacgtgcgctgcgtgggcgaatcctggccgctgacgttggatcgggcgcgcatcgaagcggaaacgctgttgatccacggcggtttctgcccgcggcatacggtaaaagtcttgcatcacgatcctgagttggcggtgatggtgcaggaagatctctccgatcatcgcatctggcgcagcgaactggtgcaggggaactatcatccgctggcggccggtcagctggcggaatacctggcgcagacgctgttccacacctccgatttttatcagtcggcgcagcagaaaaaggcggaagtcagccgtttcaccaaccccgaactgtgccagatcaccgaagatctgttctttaccgatccctatatcgaccatgagcgcaatcagttcgaggcggcgctgttgccgcaggtacaggcgctgcgcgaggatgcgccgctgaagttggcggtcgccggcctgaaacatcgcttcctcagcaaggcggaggcgctgttgcatggggatatccacagcggttcgatcttcgtggcggaagggcgattgaaagcgatcgacgctgaattcggtttctacggcccgatcggtttcgatgtcggcactgcgttaggcaatctgctgctcaactattgcggccagccggggctgttcgggccgcgcgacgccgccgccgggcgcgagcagcggctgcaggatgtgcgcgagctgtggctgatctttgccgatcgtttcctggcgctgtgccatcagcaaagccgcgatgcggcgctggcgacgccgggttacgccgagcagttcctgcagcaggtctggagcgacgcgataggatactgcggcaccgaactgattcggcgcaccatcggcctggcgcacgtcgccgatctggacagcatcgccgacgctgacatgcgcctcgactgccagcgtcatgcgctgggtttggggcgcacgctgatcgtcaatgcaccgcagatcgagcatatcgacgcgctgttggcgcgcattcgtcagcaaggctgaaaaggcgggtgctcgtggatccagcctgacatcatcagccaacgggcggggcgaaccccgccgttgggttgccttaccgttcggattcgtaagccaaagtggccgcaacctccgagtctcccaacctgatgcgcagttcgcacagcgaaccgcgggttagccagatgaacgcgatcagcgtcatacagacgatcaccagtttaagcacgacccgtttttgctgcatttttgacctccctatccttgccttgcggcgggtaagaggctaacctgatgttgcttggcatcagagtggcctcgggttgataatatcgactcggggcctttctctttctctcctttgccaaggcgccggacagaaagatccagagcacccgcggcgcagtctacccgaacttccttcccgttaaatccgccgttgcgccaacctgcggcgcggtgcgcagtttgtcatgaaagcaaaagaaaaaggggcgatgatgatcgccccttggatgcgtgaagtgaaccttaagccgcttcggtctgctgctggcgcttagactgcgccgccggcttttccggcttggcggccgccagcgcgtccggcgcgaagtcgtctacgttgatggagcgcaggcggctctcttcggctttcaccaggatcttcgcctcgtcggcgctgatcttgccttcttccagcgcgcgctccgccaaacgatccagacgggtgaacggcaggtttttgccggctgccttgcacaggcgttcgtgaatcggctcagcggccatcacgtcggccagcgccgcttccagcaggccgattgggttatgctcgctcggcgtcaggtactggccgcgccccagacggctgcgggtggcggaaggcacctgcaggatcttggccagctgatgatccaggcgatcggacggtgcggtatgcacgcggccgaacgggaagaccacgaagcgcagcgcgccggcgataaagcggttcgggaagttgcgcagcagatcatccagcgcctgttcggctttatgcaggctgtcttgcacgccccaatgcaccagcggcagatcttctttctgacggccttcgtcgtcaaagcgtttcagcacggcggaagccaggtacatctggctgaggatatcccccaggcgagcggagatgcgctcgcggcgcttcaggctgccgcccagcacgcccatggaaacgtccgacagcaacgccaggttggcgctcaggcggttcaactgctgatagtaacgacgggtcgcgtccttggttggcgtggcgctggtgcggccgttggtcagacccagccagaagctgcgtaccttgttgctaccgacgtggcccaggtggccgaacagcgatttatcgaaggcgttcagatcgttgttctgcgccgccgccatttcatccagcacataaggatggcagcggatcgcgccctgaccgaagatcatcatggtgcgggtcaggatgttcgcgccttccaccgtgatggcgatcggtgcgccctgataagcgcgagccaggaagttggattcgcccagcatgatgcctttaccgccggcgatgtccatggcgtcaacgatcgactgctggccgcggtgcgtacagtggtatttgacgatggccgacagcacggccggtttctcgccctgcaccagtgcataggtgatcagcgaagcggcggcgtccatcacataggtgttgccggcgatgcgcgccaacggctcttcgatcccttccatcttgccgatggagatcttgaactgacggcgaatgtgcgcgtaggcgccggtcgccagggcgatggatttcaggctgccggtggagttggacggcagggtgatgccgcgaccgaccgacagacattcaaccagcatgcgccagccctggccggccattttcggcccgccgatgatgtaatcgatcggcacgaacacgtcggtgccgcgggtcgggccgttctggaacggcacgttcagcgggaagtggcggttgccgatttccacgcccggcgtgctggtcgggatcagcgcacaggtgatgcccggggattcgttgtcgctcagcaggcggttagggtcatgcagtttgaatgccaaacccagcacggtggcgaccggcgccagcgtgatgtagcgcttgttccaggtcaggcgcatgcccagcacctgcttgccttgccattcgcccatgcacacggtgcccacgtccgggatcgcgccggcatcggaacccgcttccgggctggtcagcgcgaagcaagggatctcgtcgccgcgcgccaggcccggcagatagtggtttttctgttcttcggtaccgtaatgctgcagcagttcgcccgggccgagggagtttggcacgccgacggtgatcgccaggatgccggaaacgccggccagtttttgcagcaccatcgcctgagcgtaaggggagaattccaggccgccgtactctttcttgatgatcatcgcgaagaaacggtgttctttcaggtatgcccagagttcaggcggcagatcggccagttcatgggtgatctggaagtcgttggccatgcggcaggcttcttccaccgggccgtcgataaacgcctgctcttcttccgtcaggcgtggtttcgggtagctgtgcagcttgttccagtccggcgcaccgcggaacagatcgccttcccaccaggtagtgcccgcgtcgatcgcttccttctcggtggtggacatcggcggcatcaccttgcggaaggcgcgcagcgccggcgcggagagcagagagcgacgcacagaggaaaggttcagcggcagcagcacgatcgccagcggcagcaacagccagaagctccacaggccgatcgcgcccatggcggcagtgtatgccaccaggatcaggctgctgagggtaaggttcactcggtggtagaacaccacgccgaggagcgccagtaaaacgacaatactaagaaccatcataagaagctccgaagtagtaagaggtctgacctgttgtgtgtatgtaataggttttagtacaaggcagaatttttatcaatgcgtttacagtttaattacaactcaggtcacaaactgacagcaccaatcatcaaaaacctctccgcttccttaaccggcgcgctgtttggctgagaatgcttctcgctgtttccgcgatccggtacactgcggagcggaagatttgacgataacaagaggttcctcatgtaccacgaccttattcgcagtgaactgaacgaagcggctgataccctggcgaaatttatcaatgacgacgccaacatcgacgccatccaacgcgcggcggtgctgctggcggattccttcaaagccggcggtaaagtgatttcctgcggcaacggcggttcccattgcgacgcgatgcacttcgccgaagagctgaccggccgctaccgcgaaaaccgcccgggctacccggcgattgccatctcggacgtgagccacctgtcctgcgtcagcaacgacttcggctatgagtatgtgttctcgcgctatgtggaagcggtgggccgcgaaggcgacgtgctgctgggcatttccacctccggcaactccggcaacatcatcaaggccatcgacgcggcgcgcgccaaggggatgaaagtgatcaccctgaccggcaaggacggcggcaagatggcgggttccgccgatgtggaaattcgcgtgccgcacttcggctacgccgatcgcatccaggagatccacattaaagcgattcacatcttgattcagctgatcgaaaaagagatggttaaggcgtaatagccttcggggggctgcagctccccatgaataagactgcgggcgccgcatatatgccgcgcccgcacagcctgtgtcagtgtggttaaggagtgctggcgatgtgtgaactgctcgggatgagcgcaaacgtaccgaccgatatctgcttcagctttaccggcctggtacagcgcggcggccgcaccgggccgcataaggatggctggggcattaccttctatgaagggaacggctgccgtacattcaaggatccgcagccgagcttcaactcgccgatcgcccgcctggtgcaggactacccgatcaagtcttgcgcggtggtgtcccatattcgccaggccaaccgcggcgaagtggcgttggaaaacacccatccgttcacccgcgaactgtggggccgcaactggacctacgcgcacaacggccaattgaaaggctatcgccagctggataccggcacgttccgcccggtcggccagaccgacagcgaatatgcgttctgctggctgctgcaccagctggcgctgaaatatccgcgcaccccgagccagtggccggcggtattccgctacattggcctgttggcgagccagctgcgcaagaaaggggtgttcaatatgctgttgtcggacgggcgcttcgtgatggcgtattgctccaccaacctgtattggatcacgcgccgcgcgccgttcggcaaggcgacgctgcttgatcaggacgtggagattgattttcagcaacagaccacaccgaacgatgtggtcacggtgatcgccacccaaccgctgaccgccaacgaaacctggcacaagattgagccaggcgagttcgcgttatttcacttcggtgagcggcttgttctgagcgaaggggttggtgttgggcgtcgggctggctgacgcgtactgcgtcatcatgccgccgctgctcatcagcggttgacccaagacgtactggccattgaccacgcccattgtcggcggttggcggttcttcgcgaagtaatcgtagcccggcttcagctggcgccagaaggcgatatagctggatgacgcatggcgtttcaggttctgttcggtcatgcggaacgggtagatgctgatgtcgacgcggctttggccataggcgaaggcggcttcgacgtagcgatagatctcatccatataggtgttggtcatcgcgtaacagccgatcgatttacattcgccgtggatcatcagataagcgccggaatagccctgcgacttatcgtaatcgttaggaaaaccgatattgatcgcccgataatacttgctgtcgggtttcagatggcgcgcgtcaacgctataaaagccttcaggacttttaaagtcgccttcacgacgtttaggacccagcccgccggagaaattacagatcgggaacgtgttgaccaggcggaattcattgcccattctggcatacaattccagcttgcgttcctctttgaagatctgaatatagaccggcgaacccaataattgctgtttaactaccggcgcttcgggtacctgctcgctggcgctgcaggccgtgatcatcggcatagaaacaagcatcgcaaacaacagcgcgattttgctcattataattcctgcttatatttatctgccggcgcaatcaacctggccagcatgccactgattattgtttttactgctgcaaaacaccgccagattaccagcgcgtttatttttagcaatacgtgatatgtataaaaaaacgacaaagctcgataaaagtgaaatgaccggcagattttaacgataagtagtgaaaaacaggcgaaatttaattgcgtttgcttgacccaagtcacgacgtaacgcagaacaatgttgcgaacaatgttaatattctctcttcaatttaacgcgcggtggcgattgaagcggcaggggttatggcatataacccggccgtttcggtggttatttggctacaggccgttaacacatcgattgtcacgcaaataacggagaggggggaatcaagggaatgcgcgttaccccatatattcactgcgagaaagttcatgttgggcgtgccgccatgcgcactgcccggcaatcctggcatcgtccgcacccgcctctggggccgggcagacgtgtaaaccaaactacatcgtataaatcctatgattaagatcagaaaagggctggatctgccgatagccggggttccggttcaggcgatccaagatggcccgaacattcagcatgtcgccctgcttggggaagagtatgtcggaatgcgcccctccatgctggtgcaggaaggcgataccgttaagaaaggccaggcgttgttcgaagacaagaaaaaccccggggttttcttcacggcacccgccagcggccgcatcgccgcgattaaccgcggcgagcggcgcgtattgcaatcggtggtgattgcgctggataacggcggcgacgatcagctcgagttcgcgcactacccgctgggtgaactgagccagctgccgcgcgaacaggtcgaaagcgaactgatcgccagcggactgtggaccgcgctgcgcacccgtccgttcagcaagacgccggctcccggcagcgaaccgcgcgccattttcgtcaccgctatggacacccagccgttggccgccgatccgcaggtgatcatcgccgagcagcaggcggcgttcaacgccgggttggtggtgctggcgcgcctgacggcaggcaaggtgcacgtgtgccatgccgccggcgcttcggttggtcagcagagcggcccgcagatcgcctacagcgaattcgccggcccacatcccgccgggctggcgggcacccacattcacttcctcgaaccggtcagcctgaagaaaaccgtttggcacatcggttaccaggacgtgatcgccatcggcacgctgttcaccaccggcaagctcgatacccgccgtgtggtggcgctggccgggccgcaggtggcgcagccggcgctgctgcgcacccgcctgggggccagcctcgatgagctgaccgccggccgcctgaaaggcggcgagaaccgggtgatctccggttcggtgctgaacggcatgcacgccgccgggccgaacgcctggctcggccgtttccactcgcaggtgtcggtgctggaagaagggcgcgacaaagagctgttcggctggatcgtgccctcgccgaacaagttttccattacccgcaccacgctgggccacttcctgaagaacaaactgttcgccttctcgaccaccaccaacggcggcgagcgcgccatggtgccgatcggcaactacgagcgggtgatgccgctggatattttgccgacgctgctgctgcgcgatctgctggcgggcgacagcgacagcgcgcaggcgctgggttgtctggagctggacgaggaagatctggcgctgtgcaccttcgtttgccccggcaagtatgagtacgcgccggtgctgcgcgaggtgctgaccaagattgagcaggaaggataaccgatgggcctgaagaattatttcgagaagatagagcatcacttcacgccgggcggcaaactggaaaagtggtacccgctgtatgaagcgaccaccacggtgttttacacccccggcacggtgacgcgcggcgcttcgcacgtgcgcgacgccatcgatttgaaacgcatgatgatcctggtgtggctggcggtgttcccggcgatgttctggggcatgtacaacgtcggccagcaggcgatcccggcgctgcaccatctgtacagcggcgacgcgctgcaacaggtgctggcgggcgactggcattatcgcctggcgcagtggctcggcgcctcgctggcggccgacgccggctgggtcagcaaaatggtgctgggcgcctgttacttcctgccgatctacgccgtggtgttcgtcgtcggcggtttctgggaagtgctgttcgccattatccgcaagcatgaggtcaacgaaggtttcttcgtcacctctatcctgttcgcgctgatcgtgccgccgaccctgccgctgtggcaggccgcgctgggcatcaccttcggcgtggtggtggccaaagagatcttcggcggcaccgggcgcaacttcctcaacccggcgttggccggccgcgccttcctgttcttcgcctatccggcgcagatctccggcgatctggtgtggacttccgcggacggtttctccggcgcgacgccgctggcgcagtggagcgcaggcggggcgcacagcctgagcaacgtagccaccggccagtccatcagctggatggacgctttcctcggcaacattcccggctcgatcggtgaggtgtccacgctgatgatcctgatcggcggggcgattatcctgttcggccgcgtggcctcctggcgcatcgtcgccggcgtgatgctcggcatggtggcttccgccatgctgttcaacgccatcggttccgacaccaacccgatgttcgccatgccgtggtactggcacctggtgctgggcggtttcgccttcggcatgatctttatggcgaccgacccggtttccgcctccttcaccaacaaggggaaatggtggtacggcattctgatcggcgtgatgtgcgtgctgatccgggtggtcaaccccgcctatccggaaggcatgatgctggcgatcctgttcgccaacctgttcgcgccgctgttcgattacctggtggtgcaggccaacatcaagcggagaaaagcccgtggcgaatgaagcgaaaaacgacggcatcggtaaaacgctgctggtagtgctgctgctgtgtctggtgtgttcagtggtggtggcgggctccgccgtcggcctgaagtccaaacagcaggagcaaaagctgctcgataagcagcgcaatattctcgacgtagccggcctgttgcagccgaaaatggagagcgagcaggtcaagcgcctgtacagcgagcgcatcgaaccgcgcctggtggatctgaacagcggcgagtttgtcgccggcaaagcggcggcgttcgatctgggcgccgcgctgcgcgacgacgccaaaagcgtggcgctggcggcgggcgacgatccggccggcatcaagcgccgcagcaaccaggcggaaatctacctggtgcgcgatgaaagcggccaggtgaacaagattgtgctgccggtatacggcaccggcctgtggtcgatgatgtacgccttcgtggcgctggataacgacggcaacacggtcaagggcatcacttactacgaccagggggaaaccccggggctgggcggtgaggtcgagaacccgtcctggcgccagcagtgggtcggcaagcagctgttcgacgacaacggccagccggcgatccgcgtggtgaaaggcggcgcgcgccagggggatgtgcacggggtagatggcctgtccggcgccacgctgacctccaacggcgtgcagcatacgtttgatttctggttgggcgagcacggcttcggcccgttcctgaaaaaagttcgtgaaggagcgctgaaaaatggctgattccaaagagataaagcgggtcctgctggggccgctgttcgacaataacccgatcgccctgcaggtgctgggcgtctgttcggcgctggcggtgaccaccaagctggagacggcggtggtgatgaccattgcggtgacgctggtgaccgcgttctccagcttcttcatctcgctgatccgtcaccatattcccaacagcgtgcgcatcatcgtgcagatggcgattatcgcctcgctggtgatcgtggtcgatcagctgctgcgtgcctatgcgttcgagatctccaagcagctgtcggtgttcgttggccttatcatcaccaactgtatcgtgatgggacgcgccgaggcctacgccatgaaatcgccgccgatcgagagctttatggacggcatcggcaacgggctgggctacggggtgatcctggtgctggtcggtttcctgcgcgagctgatcggctccggcaagctgttcggcgtgccggtgctggaaacggtgcagaacggcggctggtaccagccgaacggcctgttcctgctggcgccgagcgcgttcttcatcatcggcctgctgatctgggtgctgcgcaccctgaagccggcgcagatcgaaaaggagtaaaggccgatggaacactatatcagcctgtttgtgcgcgcggtgttcgttgagaacatggcgctggcgttcttcctcgggatgtgtaccttcctggcggtgtcgaagaaggtctcgaccgcctttggcctgggcatcgcggtgaccatcgtgctcggcatttcggtgccggtgaacaacctggtctacaacctgatcctgcgcgacggcgcgctggtggaaggcgtcgatctgagcttcctcaacttcatcaccttcatcggcgtgatcgcggcgctggtgcagattctggagatgatcctcgatcgcttcttcccgtcgctgtataacgcgctcggcatcttcctgccgctcatcaccgtgaactgcgccatcttcggcggcgtgtccttcatggtgcagcgcgactacaacttcgccgaatcggtggtgtacggcatcggttccggcaccggctggatgctggcgatcgtcgccatggcggggatccgcgaaaaactcaagtatgccaacgtgccggcagggctgcgcggtctgggcattacctttatcaccaccggactgatggcgctgggcttcatgtccttctccggtgttcagttgtaaaggcgggaagaatttatggaaattattttaggcgtagcgatgttcaccgccatcgtgatggtgctggtgttgctgatcctgttcgccaaatcgaagctggtgaacaccggcgacatcgcggtggaaatcaacggcgatctggataagagcttccatgcgccggcgggcgacaagctgctcaacgtgctctccagccaggggatcttcgtctcctcggcctgcggcggcggcggctcctgcggccagtgccgggtggtgatcaaagagggcggcggcgatatcctgccgaccgagctctcgcacatcaacaagcgcgaagcgaaagagggttgccgcctggcgtgccaggtgaacgtgaagcagaacctgaagatcgagctgccggaagagatcttcggcgtgaagaaatgggaatgcgaggttatctccaacgataacaaagccacctttatcaaagagctgaagctgaagatccccgatggggaagacgtgccgttccgcgcgggcggtttcatccagatcgaagcgccggcgcacgacatcagctacgccgacttcgacgtgccgcaggagtatcgcggcgactgggacaagttcaacctgttccgctaccgctcgacggtgaacgacaccacggtgcgcgcctactcgatggccaactatccggaagaaaagggcatcatcatgctcaacgtgcgtatcgccacgccgccgccgaacaatccggacgtgccgccgggcatcatgtcttcctatatctggtcgctgaagccgggcgacaaggtgaccatctccgggccgttcggcgagttcttcgccaaggacaccgacgccgaaatgatctttatcggcggcggcgcgggcatggcgccgatgcgctcgcacatcttcgatcagctcaaacgtctgaactcgaagcgcaagatcaccttctggtacggcgcgcgttcgctgcgcgagatgttctatgaagacgatttcaaccagctgcaggcggagaacgacaacttcacctggcacgtggcgctgtcggatccgcagccggaagataactggaccggctacaccggctttatccataatgttctgctggagaactacctgaagaaccacccggcgccggaagactgcgagttttacatgtgcgggccgccgatgatgaacgccgcggtgatcaagatgctcaaagatctgggcgtcgaagacgaaaatatcatgctggatgactttggtggctaaattgcgcgcattggcgacgaagaactggctgacgggcgtggcgctgagcgccaccctgctgctgaccggctgcgggccggaacaggtggatctgacgggtaaaaccatgggcacctcgtattcgatccgttacgtgaccggtgacaatacgccgtcggcgcgcgagatgcaggcggagatcgacaaacggctggagcaggtgaacgatcagatgtccacctaccggccggattccgagctaagccgcttcaacgccagccgcgacattgaccggccgttcccggtttcgccggccaccgccgaagtggtgcgcgaagcgctgcgcatcaatcgcgtcaccgatggcgcgctggacgtgaccgtcgggccgctggtcaacctatggggtttcggcccggaagggcggccggacaaagtgccgagcgaggcggagctggcgcaccgccgcgcctggaccggcgccgacaaactgtcggtgcagggcagcgcgctggtgaaaagcatccccgagctgtatgtcgatctgtcttcgatcgccaaagggtatggcgtggacgtggtggcggaatacctgcaatcgcagcacgtgcaaaactacatggtggatatcggcggcgaggtgcgcacgcgcgggcataacagcgaacaaaagccgtggcgcattgccatcgagcgcccgaccaccggcgcgcagcagcaggcgcagctggtgatccagccgggggagatgtcgatcgccacctcgggtgactatcgcaactacttcgaacaggacggggtgcgctattcgcacaccatcgatccggtcaccgggcggccgatccatcatcggctggtgtcgatcaccgtgctgagcccgacctgcatgaccgccgacggcctgtccaccggcctgaacgtgatggggccagagcgcggcatggcgcaggccaacctgctcggtatcccggtgttcatgatcgtgaaaaccgccgacgggtttgaggagcgttattcggacgcgttcaaaccctatctgaaaaagcgttcgtgaggttgctatgttgacggtattcgccgctaccttcgtgttgttcctgctgatcgtcggcgggatgtcgctgggttacgtgttcaaacgcaaaagcctgcagggcagctgcggcggcatcaccgcgctgggcatggagaaagtctgcgactgcccggagccgtgcgatgcgcgcaaaaagcgcgaagccaaagcggcacagcggcgcgagcagttggacaagcaccgcattctgtagcgaagcgaaaacccggccttggccgggtttttttatttcgccttgcggaagcttttcgcctcggccggcgagttgaccatcacgccgtcggcccccagcgccagcgcctgctgatactcctgcggcgtgttgacgccgaacagaatgatgtgcgccgggccctgcgagcggaaacaatccatcgactctttatcccaggtcagaaacgccttcgagcgcccttcgccgagggtgtacttctctaccacttccacctcacgcttcagctccagcccataccagcgcggctgtcggttgtccggtttgacatcgcactggtgcgccatggtgacgttagccagcagcgtgcgggtctcgtcgcggctttcgaagcgcgggatggccggcggcagcgcctgcaggtatttggcatcggtagagtagacgcgggtgcggttcaggctgtcggtgctttccagcgtcgccagcagcgcctggccaaactgcgccggatcggcgtccggggatttgatgtccagatagaaggtgacgtgcggaaacgcctttagcacctcgtccagtcgcggaatgccgatgccctggccgcggaacggatgtgcatcgcctttggcgaacgcccagccggcatcggtctcggccaattgcgcggcggtataggcagagaccgggccctgccggttggtcagcgccttcagatccgaggggcgatacagcacgatgacgccgtctttggatgcttgcagggtgatccaaacggcgtcggcgccgtttttcagcgcggtttcgatggcgatgcgggtgttttccggcgcatcggcggtgccgccgcgatgggcgacgatcgccggcgcgtgaccggtggcggcgctggccgccaacgcgctcagcgacagcgcggaagccagcagcaaataagaaaatctgatcatgtagggtaccttgtcgttatcgttgtggtgagctgcacgggatggcggaaatcatactattgaaaaattaagcttttttaacaacgcggaaatatctggcggaaacggcgctttcatcgaagcctgcggccttgagctttcggtatctgactgtatacttatacagtgttactggagggtgcgatgcgtaaaatcattcatgtcgatatggactgcttcttcgcggcggtggaaatgcgcgacgatcccagcctgcgcgatatcccgctggcgattggcggcagcgccgatcggcgcggggtgatcagcaccgccaactacccggcgcggcgctacggcgtacacagcgccatgtccacggcgatggcgctcaagctgtgtccgcatctcaccctgctgccggggcgcatggcggcctataaagaggcttcgctgcacatccgtgaaatcttcgcccgctatactccgttgatcgagccgctgtcgctcgatgaagcctatctcgacgtgaccgacagcccgcaatgcaacggctcggcgacgctgatcgctcaggagatccgtcaagcgattgccgacgagctgaacctcaccgcgtcggccggcgtcgcgccgatcaagtttctcgccaaaatcgcctccgagataaacaagccgaatgggcaatacgtgatcaccccggcgcaggtgccggcgtttttgcagcagctgccgctcagcaaaatccccggcgtcggcaaggtgaccgccaagcggttggaggacgtggggcttatcacctgcgccgacgtgcagcaatacgatttggcgcagctgctcaagcgcttcggcaagttcggccgggtgctgtgggagcggtgtcagggcatcgatcggcgcgaaatctcggcggagcggctgcgtaaatcggtgggcgtggagcgcacgctggcggaggacattcacgactgggaagattgcgaaacgctgattatcgacaaactctaccccgagctggagatgcggctgcgtaaggtgaagccggatctgcatatcgcccgtcagggcgtgaagctgaagtttcaggattttcagcaaaccacccaggagcacgtgttcccggtgctgaatcagcaggatttgctggcggtggcgcggcaggcgtggcgcgaacggcgtgaagggcgcggcgtgcggctggtggggctacatgtgacgctgctcgatccgcagctggagcggcagctggcgctgccttgggaataaaaaagccggcgattagccggctttttgcgttaagcgcgcagattacgcgcgctcagggatcgctttcagcagcgaggtcagcagcttccagtacagaccgacgctttcgatatgcacctgctcatccggcgagtgcgggccggtgatggttggcccgatcgataccatgtccatgtttggatacggctttttgaacagaccgcattccaggccggcgtggatcaccatgatgttcggcgtcttgttgaacagctcctgatacagctcgcgcaccaggtgcatcaccggcgagtcggcgtccggctgccagcccgggtagccgcccttcggtgccaccttggcgccggccagctggcccagcgcggtcagcatctcgaccacgtaatctttgccgctgtcgatcagagagcggatcaggcagatgatttccgcttcgttttcgctggtggtgaccacgccgacgttcagcgaggtttccactacgcctttcaccgcgtcgctcatgcggatcacgccgttcggcgtgccgttcagcagcgccaggaagcgttgctggctgtcggcgctcagcgcctgcgaagcgctggtgaccggctccagcagcacggtgatgttcttctctttggcggagagttcgttctgcagcaccgccaggaactcctggctcagcgctttcagcgcgtcggctttttccgccggcaccgcaaccaccgcggaggcttcacgcgggatggcgttgcgcagggtgccgccgttcagatccagcacgcgcaggttcagctccgccgcatgggagaacaggaagcgcgccagcagtttgttggcgttgcccagaccgacgtggatctcggcgccggagtggccgcctttcaggcccttgagggtcagcttcagggtttggtaaccggccggcaccgcttcgcgctgcagcggcagggtggtgatgaagtcgataccgccggcgcaacccatgtagatttcgccttcttcttcggagtcggtattgatcaggatgtccgcctgcagccagtttggctgcagcccgaaggcgccgtccatccccgcttcttcggtcatggtcagcagcacttccagcgggccgtgctcaacgctgtcgtcggccagcaccgccagggcggaggccatgccgatgccgttgtcggcgcccagcgtggtgccgcgcgctttcacccactcgccggcgatataaggctggatcggatccttggcgaagtcgtgcacggtgtcgttattcttttgcggcaccatgtccaggtgcgcctgcagcgccaccggcttgcggttttccatgcctttggtggccggtttgcgcagcaggatattgccgacctgatcgcgctcggcgtgcaggttcttctctttggcccaggtgaggatgtgctgcgccagcgcttcttcatgataagaagggtgcgggatagaacagatcttggcgaaaatatcccacagcggctgtggcgaaagctgagacaattcagacactataagtctcctgtgacggcaggctccgacaggacgggcgtgccgcgcggttgaggtgagcgggtatctgtgcgtcgtggcacgatcgttagagaatatcactttatttccggcggcgcgcgccccgtattgtgcggtttaagcgcttgatcacacggcttcgcggcgggaacgttcgctttttcagcatcaatcaccgaaaagccgcgcggcggaaatcgcgaggttttcctcggtacagctggaattcaacgcggccagtctctataatctcgcgcaaccttttttcccctgaactataaagtaagccgcttcaccagccggctgggacacgattctatgagcgaaaaatacgttgttacctgggatatgctgcaaatacatgcacgcaagctggcgcaccgcctgctgcctgccgacaaatggaccggcatcattgccgtcagccgcggcggcctggtgccggcgggcctgctggcgcgcgaactgggcattcgctatgtggataccgtctgcatttccagctacgaccatgacaaccagcgcgaaatgaaagtgctcaagcgcgccgaaggcgacggtgaaggcttcatcgtggtggacgatctggtggataccggcggcaccgcaaaagcgatccgcgacatgtacccgaaagcgcatttcgtcaccatcttcgccaagccggcgggccgtccactggtggacgactacgtgatcgacatcccgcaggacacctggattgagcagccgtgggacatgggcgtcagcttcgttccccctatcggcggtcgctaagctcagccagttccaagtcaacgcccggttatgtcgggcgtttgtttaaggataaacgtgatggcgttgtcaggcttaccgaaggcaagatataaaaaataaggaaaatcaatttattgattttcggccgttgaccacaaaggaggaaaaaccacgctttttcctcctttgtcagccgcctgacgcccggttatgccgggcgtttgcgttatcttggtttatcccgccagagttaggtacactacctccagttaagtaggcctgttgcggcctatcgccagatttacggaggctgttgttaccatggcacaggccaacctttctgaaattcttttcaagcccaaattcaaacaccctgaaacctcgacgctggtgctgcgcgcgcgcaacaaagtgagcgccgccatgcattccgcattggaaggcgacaccaccggcagctggtaccgcatgctgaacccgctgctgtgggcctggcgcggcgtcagcccgatcgaaatccacgaagtgctggcgcgcatcgccgcctccgacgccgagcgcagcaacccgcagcggctggataccgtggtgggctaccgcaacggcaactggatttacgagtggatccatcagggcatgcagtggcaacagcgggcgacggagcagcaggatccgctggtcggcggcgagtactggctgaaggccgcaagcctgtacagcatcgccggctacccgcacctgaagggcgacgaactggctgaacaggcggagatgctggctaaccgcgcgtacgaagaggcggcgctgctgctgccgtatcagctgaaagagctggagtttcgcatcgaaggcggcggcagcgtcaccgggttcctgcacatgccggagaagggcgaagcgccgttcccgacggtgctgatgtgcggcagcctcgatacgctgcagaccgactatcatcgcctgttccgcgactacctggcgccgcacggcatcgccatgctgacgctcgacatgccgtcgatcggctcctcctgcaaatggaagctgacgcaggactccagctacctgcaccagcaggtgctgatccagctggcctcggtgccgtgggtggatcatcagcgggtgagcgccttcggcttccgcttcggcgccaacgtggcggtgcgattggcctacctggagccgcagcggctgcgcggcgtagcctgcctggggccggtggtgcatcgcctgctgtgcgacagcagcacccagctgaacgtgccggacatgtatatggacgtgctggcgagccgcatgggcatggctaacgcctcggacaacgtgctgaaggtggagctgaacagctactcgctgaaaatgcaggggctgctggggcgccgttgcccgacaccgatgatctccggctactgggagcgcgatacgctcagcccgaaagaggagtcgcagctgatcgtcacctcctcggtgagcggcaagctgatcgctatcccgcgcaccccggtctacgacagcttccaccgggcgttgctacagatgtccggttggctgagggacaaaatgcgttaattagttgctaaattttaacagtttgttaaaaagagtggtctacattgaggaggtgagagaatgacgttaccgagtggtcaccctaaaagccgactaatgaaacgttttgccagcttggggccgtacctgcgtgaagggcaatgtgagaacgaccggtttttctttgattgtttggccgtctgcgtcaatgtaaagcccgctccggagaagcgcgagttctggggctggtggatggagctgcaggcggaagaggcgcgcttcacctattcgtaccaattcggcctgttcgacaaggaaggcgactggacggcgcaaaacattaaggatgatgaagtgaacgccaagctggaagacaccctgcgcgacttccatcgccgcctgggcgagctgctggcgaccatggagctggggctggaacccgccgacgatttcaaagaaaaactgatcaaactctccgcctgaccccgtttgaccacgtattgtgctgatttcgcgttgtgcctgttggcataacgcgtctctcctgttacaaagacctttgcactcttcttctcatcattacacacggcagaaatactatgaacggcagccagacattggttgtgaaattgggcaccagcgtgttgaccggcggatcgctgcgtctgaaccgcgcccacatcgtcgaattggtgcgccagtgcgcgcagcaacacgccgcgggccaccgcatcgtcatcgtcacctccggcgccatcgccgccgggcgcgagcacctgggctatcccgagctgcccgccaccatcgcctccaagcagctgctggcggcggtagggcagagccggctgatccagctgtgggaacagctgttctccatttacggcatccacgtcgggcagatgctgctgacgcgcgccgatctggaagaccgcgagcgcttcctcaacgcgcgcgacaccatgacggcgctgctggacaaccgcatcgtgccggtaatcaatgagaacgacgccgtcgccaccgccgaaatcaaagtgggcgacaacgataacctgtcggcgctggcggccattctggccggggccgataaactgctgctgctgaccgatcagcagggcctctacaccgccgatccgcgcaacaacccgcaggccgaactgatccgtgaagtgcacggcatcgacgacgcgctgcgcgccatcgccggcgacagcgtctccggtctgggcaccggcggcatgggcaccaagctgcaggcggccgacgtggcctgccgcgccggcatcgacgtggtgatcgccgccggcagcaagccgggcgtggtggcggacgtgatcgagggcaaaccggtgggcacccgtttccacgcgctggaaaccccgctggaaaaccgcaagcgctggatcttcggcgcgccgccggccggtgagatcaccgtcgacgacggtgcggtggaagcgatgatggcgcgcggcagctcgctgctgccgaaaggcatccgcgaagtgaagggcgacttctcgcgcggcgaagtgatccgcatccgcaacctggcggggcgcgatctggcgcacggcgttagccgctataacagcgatgcgatgcgcatgatcgccgggcaccactcgcaggaaatcagcgagatcctcggttacgaatacggtccggtagcagtgcaccgcgacgatatgattgtcagttaaggagtgagcatgctggagcagatggggaaggccgccaagcaggcctcctggcagctggcggtgctgagcacggcgaagaagaatcaggtgctgtcggtgatggccgacaggctggaagccaacagcgaagcgatcctgctggcgaacgaacaagacatggcgcaggcgcgcgccaccggcatgagcgaagcgctgctcgatcgcctgctgttgaccccggcgcggctggcggcgatcgccaacgacgtgcgccaggtgtgccgcctgaacgatccggtcggccatgtgctggacggcaacctgctggacagcgggctgaagctggagcgccgccgggtgccgctcggcgtgatcggcgtgatttacgaggcgcggccgaacgtcaccatcgacgtcgccagcctgtgcctgaaaaccggcaatgcggtgatcctgcgcggcggtaaagagacgcacaacaccaaccaggcgacggtgaaagtgatccagcaggcgctggaacagtgcggcctgccggcggcggcggtgcaggcgatcgacagcccggatcgcgcgctggtgaacgaactgctgcgcctggatcgctatgtcgacatgctgatcccgcgcggcggtgccggcctgcacaagctgtgccgcgagcaatcgaccatcccggtgatcaccggcggcatcggcgtgtgtcacacctacgtggatgccgacgtcgatttcgacaaggcgctgacggtgattgaaaacgccaagatccagcgcccgagcgcctgtaactcgctggagacgctgctggtgaaccgcagcatcgccgccgagttcctgccggcgctgagcgccaaaatggcggcggcgggcgtgacgctgcacgcggcggaaaatgcgctgccgttgctgcagggcggcccggcgacggtggtgccggtgaacgcagaagattacgacgacgaatggctgtcgctggatctgaacgtgctgctggtggacgatatcgatcaggccatcgaccacatccgcacccacggcaccaaccactccgacgcgatcctcacccgctcgctgagcagcgccgagcacttcgtgcgcgcggtggactcctcggcggtgtacgtcaacgccagcacccgcttcaccgacggcggccagttcggcttgggcgcggaagtggcggtgagcacccagaaactgcacgcccgcggcccgatgggcctggacgcgctgactacctacaaatggatcggctacggcgacgatctggtgcgtagctagggtcggattgcggtcataaagaggtcagggcgcagcatgctgcgccctgattgtttttgtaaacgggactgcacgacagtctggttgcttgtaaaacgaccaaacgccccggcggctcttgactcatttcgcgcgcaggtctaccttgttcaacgcacttccggcttgccccgcaggcccggctcgatgccgatatagctcagttggtagagcagcgcattcgtaatgcgaaggtcgtaggttcgactcctattatcggcaccatcctctcttcctgcaatttccgtattcatccataagtactctgttttataaaagtatttttgattttttaatccgtattagtccgtaatgttccagtggaatccggtctctaatgtgtataggattgtgtatatgttcctgttcggtcttggattcctatacacatgcctttaaacgatatgcagattcgccgcgctaagcctgaagctaaagcctatacacttggagatgggcaagggctgtcattgcttatagaacctaatggaagcaagagctggcggttccgctatcgctatgccggtaaacccaaaatgatctcgcttggcgtctacccaacgatcacattagcagatgctcgttctcgccgtgatgaagctcgaaaacttgtggtagaaggaaagaatcctagtgaggttcgaaaagagcaaaagttagctctgcaaacagagtcagagaacgctttcgaaaagatagccagagagtggcaccagcttaagtctgccaaatggtcggcaggatatgcctcagatatcatggaagcgtttaagaacgacatttttccttatgtgggtgcaaggccagtaggagagattaaaccgttagagctattgaacgtactgcgtaaaattgagaaacgtggcgctttagagaaaatgcgcaaagtgcgacagcgctgttcggaagtttttcgctatgccatagctaccggaagagctgagtttaatcctgcggcagatctctccagtgctctcgaagtacatcaatccaatcacttcccgttcctaaaagctaatgaaatacccgattttctgcgtgctttagagagttacacagggagtcgggttgtccagattgctactaaattactgatgattacgggggtaagaaccattgaactacgtgcagcatcatggtcggaatttgatctagataatgctatttgggaaattcctgctgaaaggatgaaaatgcgtaggccgcatcttgtgcccttatcgactcaggcgttacatttactcaatgaactcgtggtaatgacagggaactatcgttatgttttcccgggtcggaatgatcctaacaaacctatgagtgaagcgagtataaatcaagtgattaaacgtatcggttatggtgggagagtgactggtcatggtttcaggcattcattgtctacgattttacatgaacagggctatgagtctgcgtggatagagacgcagttagcacatgttgataaaaatagtattcgtggtgcttacaaccatgcacaatatatttctcaaagggggttaatgcttcaatggtattccgattttatcattaaataacaatgaggatgtgatatgaaacaatctcggagacatcattatgtacctgaatggtatcagcgtaggttcattccgaaaggcgatacgtcatattacagattagatttacatcctgacttaataacaaccccacaaggtgatgttattcgcaaaggtgaaatcctacgaaaggggcctgcaaagttttttcatcaaatagatctatatacaacaaagtattttggtgtcgaaagcgatgatattgaaagatatttatttggtgaaatagactctaagggtgctttggcgctcgctgttctttccgccgatgattggataggtaaaatacatgatcatgttataaatttttatgaatatattgatgctcaaagattgagaaccccaaaaggacttaattggttaactaaggaatttaatccaagaaatcaaaatgaattattaatgaggatgcagtatgttcgtaaaatgcactgtactatgtgggctgaagcttctttggaaatcgtcagtgccaaaaaatcctcagtcaagttcatagtaagcgacaaccctgttactttttataaccctgaagtatatccagggaatgttttatgcaaatatccatttgatccttccttgactttacaaggaactagaacgatatttcctctcgactcagaatattgcattattatcactcataagcaatttgctcgaaaacctggaaaattcaaagcattaaaacctagaataaatgctagatactttgattcaactgttataaattatcatgattttattcgtgaacgctatttcaccgaaaagatggtagcttcagtgaattttatacttaaaacacgagctgagcgctatatagctgcatcaaatcctgaatggttatatccggagaaagtgttaaaaagtactgactgggcttcttttgataaaatattcatatctaaaagcatcaagttattaggtgataatgtggagattttttttggtggtgaaaatggagagttgattgccacacaagatgaatacggacggaagcctaagaatcggcaagaatgggaagaaaaagaaaaacaagcacaagctatgcatgaacatattttacggcttttgaaaaaacatcgaagtgaaggtaaatgaaggagagttcagatacctttataaatgactatgttttgaatatttcaccatatttatatatcaagtttatgctttaatggaacatctcttgatattacaataggatagtcatccctattttgcttctgttcccaatggatagcaagtgataagtatatgattgatcttctaaccaatcttataagtagcattagtctcgcttcgaaatcacgctcactaatcattaatgaatgcttagagcgcttagttttgtcatttatcttaattttagaaagtgttatttttttaactaattcatcccttttatctattaagatgtttagttttgtctgattattattttctttatgtgttttaatctctttgcaaataaccttaatttcactatcgagagattctagattgtttttttcttctgcatagatcttttcatgattattactgtcattatttaatagtttatagccaaaattatcaattatctttaatgacctatgctcaattgcatttctgattttagaaaatttttccgcatctggatctaaccaataggactcactgtctaagttgccatctttatggtttgaatctcttatatcttttagtatgtagaacagtgcgtgtagaaactgattattgctctcttttaactttgagtggggtttcagttttccattttcaaatttaccaaaaaaattgtgaaagtaaatttttgcatcaatatcattgaaatcatagaatgagttaagaaaatatgcaattttatcaaatattgaataaagagttttaaaagcggatttataatgttgtgatttaagattggttatggcatgagacatgtcgtcgatgtgttgatatgtattgttatagaagtgaatgttttcgctgggtatattgtgcgcactaaaaatcaaataacgtgcatatatataatcgttttttatttcatcaaaattaccatggtaaactaaatcttcgcacattgttaatgtttgattaataattgcagtgtgacttggtaaggttatgcagtcagtgtatactagttccgttgtatattcatcatttagttcattgaggaataatctattgtctccgcaccacttcaaataattatattgctttttggtttcaaaattctctttgtagttatcaatggaattaaagtctgattcgttgaagtttttttcgaaccagtttttgaatttaatcaagctcccatccttactatatgctgaggctagttctggatctagcgtgctgattccattcagccctgcgcatatcgatttataagcttcatagtaatgatagtaggaatggccttcatcatacaaaaaaccagccaactctatgttattatatgcttttcttattattgcgacagggttgttatctaggtttattgccatttcccaatgatttttacaacaaagaagacgaccttgtgaacataagtaattacctaggtttgtttctatgcgactttttagattagctatgtattttttcgtgttatctatgttttgtaatgcatttagggcttttctgtaatttattactgattttccaagttcttctgaataccaagttgtatttgttttattaaagacggcagattgacaattagcaatggtgtagtaataccttgatttgattatttcatttgaaaaaatatagtttggattttctatcgcatttataaatcccaaaatatcatgcgttaaattagctgaaatcacttcatctgcacgcatttcaaaaagtgctatagcagcgtcgtctagtaatatagatggtgtttgttctgacatgttaacttctccacaaccattttatcattttacagataatgggttttttaattggtatgcagcgagttatgaatcctagggtatatacatatcttatgtctgtcttgcgcgcaatacttcccccgcctcgcctgcgcacttcatgtgtcgcttttcatgcagttgcatgaacggccgcaggccgcgccagtactggtgctggcggggatgaaaagtgcattttcttgcatgcaaaatcatgcaccctatgcatgcacgcgcaatttgaggctggctagccaggaaaaaggctgttttgggcgaggcggaaggggaattgccccgcggtgctgttaagagcggcggggcggagtgtgattagtgcagggtaggattgctgttgtagcggcgatagcggttcaacgtccgtttctccggtggtggcaaggtgttctcatcgaccggttgcgcctgtatcggctggcacaggattttatcgacgctttccaccgtcttgaatgtgcaagaacaggtcaggctctgacattggtaatacgcctcttttgtccgttccgtgatatagcgactggtgcgagtataggacgcatgggtgcacagcgggcagcgcatcatgattgagcccctttctcttgcaacagacggcgtttttccgccagttctcttgccacttgcgtccggcgaattgggctgctttgcagttccggcaatacgcccgtttcttgcgatatcgtcaggccaatctcattaagtaccgggtggtcgatattttgcgtagccatggtagcgcgaatgcggccttgtagcgtgcccagtacctgttgctcaatcattctcatcggattgtccgcatagacgccgtaagcccgtgaggccagtgcgcacgccttgataacgtcagggctgataagcgccttgctcagcgcatccacggcctgacgcatcgcgtgagctgcaaaggtcgtgagggcgtctttgtgcgcgtccaccaccttcggggccgtgccgccgcagttggggtgaagctgcattttgtccagctccatctcctcaatcaggccgtcgaactctttcgccagctcccgcttggaaatccgactgtggtgttgcgcttgcagttccggcgtcatttctccgcgcagtttgcgaaacagggtgcgccactggctttctgcctcctggctctgcacttcggtgtctttcttctgttggtggcagcgggcaatgcctgtcacgacgtcggtcaatgcctggtagtttttgtcgtgggcggcgcgagcgtcacgcagggcttgcagtgtatcggtgatgtatttcggtaaggcggtggtgctcacggtcatgtctccggtgtcagtcaatgtgaagctattctgctgaccgccgtacaacatcgccattcatcccggttggactatccccaggacaacagccttgggcgctgatgagaaaaccatcaagccgtttttagttttacctaaaactattcactactgttcacctaaagaaaaaatatagataaatcagtaaataatagggtgaacacttctcgctaaactcttcacccggtgttcaccactattcacccagtccaaaatagccttttccctggctagcggtggttagtctgtttatacctatttattagcaatgaattcattgttgaaaactatggggtaatgttgaggaagggtgaggagtagtgaggattgctgagctattataatttgttgtttttataaccatttcttgacgggccacacaacaacaccttgttgccaccccggtaaatattcacataatagggcgctaccgaagttcacacagtcccggccagcgttggccggacacaaagaggtagcgttttatgttgaccgtttccaccccatccacccgatccacccagtcgccagtgctccctggcggttacatcccgcgcgagcgctttatccgtctacctgaagtgctctataccaccggcctgtcccgctccaccgtgtacgagatgatgagccgccggcagttcccggctcaggtctcgctcggcggtaaaaacgtcgcctggctggcctccgaggtcgagcagtggatggacgagcgtatcgccaaccgtcaccagggggctgccgcatgatgcaattaacctttggtcgccagcactttaccctgagcgacaacgacgcactgtttatcgctgaggccatcctgttacaacgtaaagagcctggcgtcgtcttgccggagcaccgcagtgaaaaacacggcgttattcgtctggcgagttgccaggccgagccgcgcctgttccgagccgggccggtgccgctgacctgcgcgcctgctgatacccgcaacgacccgcttaccgactgttgatcactatgcgatcgattgaacatccgggggtgtcttacggcttgcccccacgtccggccctgcgctatagtcctcccgctgccgcaaaatcggcagccgggcgtaggaacccgtgtttaatcttggcgacaaatgaacacgcgccacgcgtgtttttttatgtcacagccttagtgcgctcattttttgcgcggtggatgttatgctaccgcagcagtcaatcaatggtggctcaggcggggcagccttcgggctggccggtttccaaggttgccggtattcctacccccgtctgggctaccaccattgagtgtaggaactccggtggtagcggtaattcgctaaccttggaggctgccgttatggctacgaccctcaccccgactcactcgacattctgctttctgtttgcggccgtgcgccgttctgcgctgacggcttcaccgcgtatggtgcgcaccgtggcggatagcgaacgcaatgcccgccgcgtgctggcccgtgattacgtgttgtcctttgccggtcgtctgccggttaaggcggcagcatgaacaccctggccgaccgctactaccgcgatacccattatcctatcccgcatgccgattttctgcgtctccagcatgcgcacgccaccggcgtgctgttcctcgacctgctggacaccctcgacctcggcgggcagcgccccgacgccgcgcaacaagcatcgtttgcttcggtcattgccctgctgaccgaccagctcggccacgtcgtcaacacctgtgaatcccaaatccttgcccgcatggaggccaccgccgcatgaacactgcatcctgtttaccgattgaagtccgtaccgccgttttccgccgcgccgtggcgcaggcctatctggatacctgcgccttttaccgggtgagcctcggatacacgctggacgagctgcagatgacgattgccctgcgcctggaggggcactttgttcgtcagtacggcgcagaagacggcatggatatggcgtgcaccatgctgagtgacatggtgcagccggacgttctggtggccgcgccgcgcctgaccgcgctggggcaaaaggtgatggacgagctgtgctgcgagcgcctgtcggcggcacagaacgcgaccgtacactgaggagaagagcatgagcgcccagttcgtttcccagaccgtacgcaccgccaccggccactggccggtgatactcccggccctcggcatcgccttgcagccgaacggcaaaccgcagccgtgtccgacctgcggcggtaaagaccgcttccgtttcgacaaccaggacggacgcggtacctggttctgcaatcagtgcggggccggtgacggcctcaacctggtggaaaaggccctgtcgctgtctgcccgggccgccgccgaacaggtggctgccgtgatgggggaaaacgccaacgccctgccaccggccgctgaggcccgccatgccttactgaagggcggcgggcaagacaaggccgaggcccagcgcaaggccgcgcgacaggcccaggctctggtgactgccgcgcaacctcagaccggcaatgcctacctgagcgccaaaggctggccggaggtggacaccctgaccttgcagggccagccgctgcgcgttggcggtatcaccttccagcccggcgacctgctgctgccgctgcataatgccgggggagaagtggttaacgtgcaactgattaacgccaacggggacaaacgcatgctggcaggcgggcaggtgaaagccgcctgccatactctgagcggcccggacaatgcggttatctggctcaccgaaggctacgccaccggcctcaccgtgcaccgcttgaccggtgaaacggtgtgcgtggcgctcagcgccaacaacctggcggccgtggcagagcagctgcgcagccactacccggacgcgcggctactgctggcggctgataatgaccgctgcggcaccgggcagacccgcgccgccgaggcggccacactcaccggcggtatcccggcactgccgccctcggaaggcgactggaacgacgtttatggccgggaaggggccgaggccacgcgcgcacagttccaggcgttcagccagccgtcgcagcccagcccgttcgacacactgagcgatgccgacctgaaagccatgagcgccagcgagaaagccgagctgctggccgagcactatggcaacaccctggcggtgccaccggtgggggaagagctgtgccgctatacccgcggcgcctggcaggtgctgccacatcggcaactgagccgggagattgccgcgctgttccagaaggtacgcgcgccgttctccgccgccggtatcaacagcattttggataccctcaagctgatggtgccgcagatgggcgagcctgcccgccggttgattggctttcgtaacggggtgtttgataccgtcagcggccagttcagcgctcaccggcaagagcactggctgcgcaccgtcaacagcgtggactacaccccgccgcgtgccggtgagaacctggccgaccatgcaccgcacttctggcagtggctgacgcgggccgccgggggcaatcacgacaagcaggaacgtattctggcggcactctttatggtgctggctaaccgctacgactggcagctgttcctcgaagtgactggcccgggcggcagcggcaagagcctaatggcagccatcgcccggctgttggcaggtagtgataacaccacctccgccaccatcgataacctggagtcggcgcgcgagcgggccagcgtggtcggttactcgctgattattctgcccgaccaggagaagtggagcggtgacggggcgggtatcaaggccatcaccggcggcgatgcggtcgccatcgacccgaaataccgcgacgcctacgcggcgcacattccggcggtgattttggcggtgaacaacaacccgatgcagttcagcgaccgcagcggcggcatctcgcgccgccgcgttattttgccgttcccggaagctatcgcccccgaagagcgcgacccgttgctattggcgaagatcaccgaagagctggccgtgattgtgcgtcacctgatgcaacgcttcgccaacccgaatgacgcgcgtgcactgctccaggcgcagcagagttcggcggaagccctggaaatcaaacggcatgccgatccgctggttgatttttgcggttacctgacggtgctgggcaccccggaaggcatgatgatcggcaatgccaacattaccccgccgaacccgcgccgctacctatatcacgcctacctgtcgtttatggccgctagaggttatcagcacgtgatgaacctgacggcgttcggccaggcggtgccgcagacactgaaagagtacgaacacacgttgctgaaacgccgtaccaagcagggaatacagaccaacttgaaattgagtgacgagtgcgaagcggactggctgccgaaatgctgtgctgtgtgacgatgagcgggtcgatcggccgggccgatcaataggccattattgatctgccgaacccattggacgctcaatcgccgcgccgcctatagtggcagtgacccaaacacacgcagcaacaccagggcatcctatcggccgcggaacggtcaatatcataacgacaagcgctcaccaaaccggctcaggccggtttttttgttcctacggttcagacggttcactctgcaggtgaacaggggggcatcgagaaggtagctatacatccatcaatgcattgaaacataaagataaaaatatgtattggaagaacggttttcctctaacccttctaaaacctagtaaaatcatgatgcatttaagtgagtagaagccaaagtcggaactgagcgaatatgagtgtgtatgactgctttttcgctgggaatctacgcacgtacgagtcaacgatgaagatacgttgtatcgagttagagatgggcttgtgatataaaactgtggctaaacgcctccttcttctcttcctcttcgacttacggcaagcgatacaaaaacagaggcgattgtataattcaagaaagctttttcgttggcgcataaaagatatcggttgactgagcggattaccagtaaacaggtatcatgaatcaaaaggaataattggagatttgatctttttaccataagtatgttgctgactaatcatcccctacaattcttaattgctggtaatctgctgtgctcttattaacttgttgatttaattttatattctccctgaaccttacaagcaccgtctccgctgatatccaaatatcttcacgtggcttattcattttgcgaaacatcgtaggggaaacaccatagtgacatttaaatactcggcagaaggcctgttgttcttggtagccgtattcaagtgcaatatctatgatttttctatctgtagataaaataactttcgccgcttctgtcatttttcttgctctgatataagatttcatcgatatcccggctaaagagcaaaatttacgttgcacataccatctggaatatccagttttatcaataaggttgatgatatttacaggctttttaatgtacgtctccaataaattaatgacactatgaataaatattttagattgttccattttgcttatatccattgcactgactccttatgtctctacctattgacgcgatctaaatctcgattattgcttaattctgtcaagatgatatcaattttttcttttttatttcacaccaatgatatggctcatctaactttttgaaatttaatgctattatttttttctgttgcacttatctttgagtgaagtcatcctaactttatttttaatgcaccaatatgtactatctctgttttttgtttaatttttaaataaaaaagtgctaagctttattatatcgatttttacttgattggcgtgactgaatagcaggttagtatatggaagaaaaaagaattttaatcattgaggacgatatgcatgttgcagaggtcctggaggcttatctaaaaagagagtgctttaccgttgccaaagtaggtgatggtgttaaggggctcgagatggctttctcttggcaacctgacttgatcttattggatgtcatgctgccaggaataagtggtaatgaaatactggcacgtgtgcgcagaaagagcgatgtgccggtcatcatggtgactgcaatcggtgaaatacaagataagatttcctcgttgaggcatggagtagacgattatatagtgaaaccttacaatccgggagaggtagttgctcgggttcatgcggtgctgagaagagcgagcacattgaatataaaatccgacctcattatttgtggtccggtacaacttgatgaagaggcgaaattagttcacgtctgccccgcagaaaatattaaaattgcagtggagcttacaccgactgaatttttattattatctgttttgatgcgtgcgcctaaaagagcattttctcgacaaacattgttgaatatgtgtttgcctgagagtgatgcatttgaacgggttgtcgatacgcatatttataatttgcgcaagaagctcaattcggtaggggtgaacgacgttctactaaccgttagagcgacgggatataggtattggaataaatgaacaaaggaaacaagagagcctcactttggaagtgggtctgtgtgagagttatttctcaatctatcggcgtggttgttattatcgcactctgtatgtggctgcggtatgccatttatagtgcatgggttttatatcatgaaatgccggcagatgtccgaaaggagttcctgcgattgcttgataaccctaatgaagatttatatagattttacagcctttttcactattggtatggcattgattttgctaatccttcgatcacttcgggggattggatcatgttgggtattctggttgttgtcgctattcctctaatggtcctactggggctttatatgtcacggccgttggcaaagcaattttcatatctggtaacagctgcgagaaaagtcgccgagggggacttctctgtgcaagcaaaattagaagagaaagcaccggaagaacttctgactctaactcacgatttcaatgagatgaccaaaaagcttacttactatgaaggggagcttcgcgcttctcatattgccatggcacatgaattacgttcaccattaacagcttcaatcgtgcggcttcagggaattatggatggtgtttttgagccggataagcatcaattgaatttggtcatgcagccattgaaaagccttaatcgacttattgacgatcttcaaatgttgtcgttgtcacaagccggggcgttatcactagagaaatataatgtgaatctgtgtgatttaattcaggagcgtttgcaatggctaaaggctgaggtctctcaggaggattttattattgaatttgaaagtactgactccgtatttgtttatgccgacccgttccgaattgggcaagttattacgattctcataaaaaatgcattgcgctatgctcattccggcaaaaaactgacaatcaccataaatcattctaatgatgaggttgtcgtcggttttcgcgattatggaccgggcgtcaatgaagcgtttttaccattgatgttcgaacgtttttcgcgggaagaaagttcgcgatctagaaatctaggcgggagtgggcttggtctttccatcgctatggcgataagccgggagcacgatggcagtctcagtgctcagaatcatcctgacggtgggatgctatttctactaattcttccaatgaaaatagagtcttgatgatttgttgaaaaagcgtggactaaatctacacataaaaaaggtttaattcttcgacagactatcaggagaatgtcttatgtcagtaggtttgttcaggttaataagtgcggtcaagggcgtattcctatttcaatactggaaacttttcattattcccctatttgtgttattggcggggtgtgatgataaagcaaagacagaggaggtgcctacacgctccgtacgaacgcttgtcgtcgataacccggttggtggagttttgataaagcacaccggagaaattcgtcctcatgaagaatctcagctctcgtttcgtattgatggtcggatcctaagccggccggtcgatgtgggagataaattaaaggcgggacaaacgatcgcgactttggagcctagaaataacgagaatcaagtgcgtagtgcgcaagcagagctggctggagctgtttctgcagaacgcttggctgctcttaatttcaaaaggttacaatcattgatcaaaaccggcgctatcgcgcaggctcaggttgatgaggctaaggtcaatcttgaagtcgctgcggcaaaacgcgtctctgctcaatcgaatttgaaaatcgctcaggagcaattgggttacacccgtctagttgcgccgtcggatggcgtagtgacttcggttaacctgaaccctggccaaactgtcagtgcagggcagggggtcgttacgctctcactcaatgagggtgtggatgccgtatttgacgttccagaagctattttgtacagcgatcttcccgataataaagtcaagattgcgctgctttccgatccttccgtcgtgactgagggtgtgatcagagatgtgaatccacaggcggataagcagacgcgaacctggcgagtgagagtctcgctagcacacccgccggagaaaatggctttgggatcgacggtgcagggaagtatcgttattccggggcaagcagcgtttgttttgccggcatctgcgatgacccgtgatggcgcggatcctgccgttctaattgttcaaccggatacatcaaccttggcgttgcgcaaagttaacgttattcgttatagctccgaggatgtgtttatttctgatgggctcaaacctggcgacaaggttgtgatcgctggtgtgagcaagttacggcctggcgagaaagtaagtttggaggataaattctgatgaatgcctctgaacccaagaagtttaacctgtctgcctgggcgcttgccaatcagcaacttgttgccttttttatgttggttatcaccattgccggggtgatgagctattacaacttgccgcgcaacgaggatccggcgtttaccattaaaacggcggtggtttccgcgagttggcctggggcctccgtggaagataccgtcaattttgtgactgatccgttggagaaaaaacttcaggaagttccttatcttgattatttggagagttatagccggcctggcgagtcggttatctttatctatctgcgtgataatactccgcctgagaaagtgaaggaactgtggtatacggtcaggaaaaaaataaaggacgtttcccctcagcttcctgctggcgtcacttcacctgctgtcaacgatgaatttgatgatacctacgggaccatctatggctttacgcgtgaaggattcagcgagcgtgaactgcgcgatctggtggacaaagttcgcacgaacgtcttaacgctgccggatgttgggaaggtgaacctgctgggcgtaaaagaagagcaggtcatcttatcattctcaccgcagaaaatagcgggtatggggctgacgcttgaccaaatcaagaacgccatcagcgcgcaaaatgccgtgactccggcgggagaaataagaaccgacaaagacaaagttatgttgagggtcagtggtgctttcgcatcggaagaaagcctcaaacagctgacactgcatattcaggatagattcgttcctctgacggatattgcgaccatctctcgcgaggcggtcgatccgccgacgccggccttcagggttaatggggagtcggcgattggtttggccatttccatggccccgaccggcaatatgctggatttcggtaaagcgcttaacgaaaagatggatgatatatccagccgcttgcctgcaggtatcaacgtgctgaaagtggccgatcaatcgacggtggtgcatgacgcggtagggagctttatgaaagtgctccttgaggcggtcgtcattgtgctggctgtttctttcctatcactaggcacccgtgccgggttagtggtcgcagcatccattccgctggtgctggccatgacatttatcggtatggaaattgccggcatcggtatacagcgtatttccctcggtgcattaattattgcgctggggttgctggtcgatgatgccatgatcactgtagagatcatgatgtcgcgcctggaaaaaggagaccctgtcaaaaaggcggcgacaaaagcttggacgacgacggctttcccgatgctgaccggcacattggtcatgattgccggttttatcccggtcggtttcgcaacgtcgagtgcgggggagtactgttattctctgttcatggtggtgctgatttcactcatcaactcctggattgttgccgtacttttttcaccgctgataggcgtgtggcttttacctaaggtgatgaaggaacacacccacggtaaaggtaaagtcatgcaaaagtacgaaagtgcattgcgatatatccttaagcgccgagggatgaccggcatcgtggcggttctgttactggccattgcttttatcggatcctcgcacatggaagaggagttctttcccgcttctgacaggccggagctactcgtcagtctgactctgccgagaaatgccgtgcaggaagatacggcgagggaagccattcgcttggaggaaatcctcaagaaggatcccgatattgatcattttacgacgtatgttggatcgggtgccgtgcggttttatttgccaatggacctgttgcttgataacgaaaatatcgctcaattggttgtggtcaccaagggacttgaagagcgtgacgccgtgaaggccaggcttgaaaaaattctgcaaaaagatttcggccatcttgttacgcgtgcgtcgccgttggagctgggtcccccggtaggttggccattgaaatatcgcgtttccggcccggatctgaccaaaatccgtgagatatccatggagttggcggggaaattgggtgacaacccgcagacaagagaggtcaaccttactgcgggagaaccgcaacgagaactctatataacgcttaatcagacggaagcgagggccttgggattaagctctcaggatgttgcaagtgctcttgctgaaatgtattcggggtccgctgtaacgacgatcagagacagaaatcgccaggttaacgttgtgctgcgagcttcagaaaatacgcggcgagacattgaaaccgtcgcggacttgcaattaacgacggctgatggacgcgttgtgccgttgaaacagattgcaactataggctatacgttggctgaacctattcagtggaggcggcaacgagagcctttcattacggtacaaacggatattgcgccagggttgaatgcgtccggtgtgtctaaagatttggcgcctgttgtcgatgaattacgcaaaagtttgccaccgggataccatattaccgagggcggaagcgtcgttgaagctatgaaaggcaaccgttcagtgttcgccgttctaccagtgaccttattggtgatgctcatcttgctcatggtgcagttgcgtagtttctcacgcatgatgttggcgctgttgattgcccccttcggtttgattggcgttgttgctgctatgttacccaccggaacgccaatggggtttgtcgcgattcttggcgtgattgcgttggcggggatgattatccgcaatgccgtgatccttattgaagaagtggaaataaacagagcacaaggcgcagataatactgaagcgattgtcgaggcggcactgcatcgttccagaccgatactcttgacggcttgtgcagcaatattagggatgatacctatcgcgcaccaagtattttggggacctatggcctatgccattattggtgggttattagtggccactttatttaccctgacggtattgccagcggccatcagcgccgttctgcaatgggaaacgtctcgatagaacttacccctcggagataactccgggggagtcttaaaaaggaggtgggcagatgtttgagttatttaaacttattgggttagggttggttttgttgctgccgctagtgaatccattgaccactgtggctctttttcttggactgtcaggcgacatgtctgaacaagaaaaaaagaagcagtcagccatggcggctttttatgtctttgtgattatgatggttgcgtggtatgccggtaaagctgttattaacacctttggtatatccattccgggattaagaattgcaggtggaatgatcgttgcgtttatcggttttaacatgttgtttccacaggatgttaataagtctcaaggcagtgagaaggaaaaaacaaaaaatatagcgtttatcccattagcaatgcccagtacggcaggtccgggtactattgctatgttgatcagtgccgcatcgacattcagcgctgaaacatcgcatctggatttgtgggtcgcatatatcgctcctcctctgattgcgatagccatttctttgattttatgggtgtctcttcgggcgtcactgggtgttatgaagcttgtaggtacatcgggaatcgatgctatttccagagtcatgggattcctgcttgtttgtatgggggtacagtttgttataaatggagtcgttgaactcgtcacaatgcaataaacgcgatcgcttcagcggctgaggtgcatggtactgcacatctcagaagagaataatatctgaaaacttatgtctatatcagttctgagaatgtacttatattcttggttatcatggctgccataaagatcatgaacaatgccgtgaactcaggcggtgataactgtcgacatgctgcgattatttatcgaaaagttcccaccttgtttgggaacttttttttactttttattctgctctggtgcgtcgtcaacggctgtgggtgttattatatctgccggttgaaaatatgccgtatactattgtggggcttggtaagatggcatgccgcgcttatatacaggcccactccaggctccgcctgacattctgatgttctactgcggcattctccgttgatgagatcgtcagagggttcaatccagtggtgaaattagggctacttagtgcgccaagtgcagaaggcggcattgcgactgccgccttctgcaccgacgcactctgatcttttgattagcatcgccttcgttcagcgagacaacactttggcgatagcctgggcttcctgctgccacccctgcgccagagtgcgcaccagggcatcatagccgtcttcaccctgtttcagctccaggctgaaaggccttttgatcaaacgcccctggcggttcagcacccactcgccgcgaatgatcgctttcccgtcaaagcggccgtggaagccgctgatggtcacgttcagcacatcctgatcgctgctcatcggctgcgaagagaccacccaccccggcagcgcgctgctcaggttggtgaccagcgtttgctgcagctgctgatcgagcgggctggcccacaggttgttctgggctatcacatactgcacgtcgttggtctgatacaccacgccgctctgcgccagataatccgccacgctcacgtgctccagccacagctggcgcgtggaggcgccgctgctgccggccgcggccggcgcgcccagcgccggcaactgatagtaagtcttctgtggcgaactgctgcaggcgctgagcaacagcgccagggctaccgggatccatttcatcatttcgtggccttcttcggctgagggtcattgctgccggcggcttcaaacaccagcgcgttgctcttctcattcagggtgcgcaacaccggttgcagctcacgcaagacctgatcgaggcgctgcatgtcgcccaccatcttgttgtaagccggtgaaccaggctggaaccctttcatgctgcggttcagctccagcagcgttttctgcatgtcctgcggcagcgcctgcatctctttgctggcgatgatgtcgttcaacgacttcatggtctgctgcgtcgacttcatggttttctggctttccgccagcgtcttggtcgcttcgctgatcatcggattgatcggcatcgaattaatcttatccaacgtctgcatcagtttctgctggatctgcgccagaccgccgctggtggtcggcatcagcggataaccgaacagctcgcgcggccctttccacggtttttcctgcggatagaagtcgagatcgatgtatagcgaaccggtcagcaggttggcggacttcatcgaggcgcgcatgccgcgggattccgcatcttttaagtgcccttcaatatcgacgttgtcccccagttgtttatgaagccgatcgggttcgatgcggatcaacaccggaatgcggtaatcgttatccagacgctgcgccatgccctctttatagaacggcacctgcgccaccgtccccagacggatgccgcggaactcgaccggcgcgcccggctgcaggccgcgtaccgagtcggagaagaacagcaggtagtctttatgcacggtatacagcgaatcctgcgtgctgcgctggttgtcgaacagccggtactccgctttctctttcgcctgttcgccgcgatcccagccgtccggcacatcgaagctgacgccgccgctgaacagcgtggtcaacgagcccatctccacccgcatgccctgtgccgacatgtcaaacgctacgccgctgtctttccagaagcgcacgttggtggtgaccaactgatcgtaaggcgcggtgatgaacagctgatagcgcatggcgcgcgctttaggatcgaagtagctgctctccaccgatccgacgcgatagccgcggaacagcaccggatcgccggcgttgagctggcctgacttctcgctgtccagcacgatgcgcaaccctttggcatccggggaggccagcggcggcgcatcgagcagctgatagttgtctttgctgtctttgcctttgttgcccggctgcagttcgatataggcgccggagagcagcgtgcccagcccggagacgccttcacggccgatctgcggcttcaccacccagaaggcggaatcctggcgcagcaatttttccatgccggaattgaggcgagcctgcaccatcaccttgctcaggtcatcgctcaacgtgacggtttccaccacgccgacgtcaacgctgcggcttttgattttggttttacccgcttccagcccttccgccgtcgaggtcaccagcgtcaccaccggcccctgatggctgaagtggtaaaacaggatccaggcgccgatcagcgcggtcacgatgggaatgatccacaccggcgaccagcgtttgatcttctcgacgtccgcgacgctatgattattttccgtcaccttgcggctccttgttgattgtttcacttgcacgatcccaggtcagccggggatcaaatgtcatggcggcgaacatggtgaggatcaccaccagcgcgaacagcacggcgcccgtcgcgggataaatgctcatcaactgccccattcgcaccaacgccgacaacacggcgatcacaaacacgtcgatcattgaccaacggccaacgaattcgaccacttcataaatcagatgcatacgctcgctgtcggcgcgcggtttcttcctgccgttcgcatcccagcacagccagccgatcgccaacattttcagcgacggcaccatgatactggcgatgaaaatcaccatcgccaccggataagagccgtccccccacagcaggatcacccccgccatgatggtggagttcatcttgttgcccagcgcctcggtcaccatgatcggcatcaggttggccggaatatacagcatgacagaggtcaccagcagcgccagcgtccactgcaggctgtgacgacgccgcacgtagcccttggtgtgacagcgcggacagcgcacctgatcggccggcaggatcgccgtgcagcacgcgcaggagcgcacgccctggcgcatgccggtgcgccccaccgtcagcgggcgatgcagtcgcggcgccggttcgatatcctgccacagccagcgccgatccacgcactggaaggcgcgcacctgcagcaggcagaacaggcagtaaggcacgaagctactgccgatgccgatatcgccgtaggccatcagcttgacgaagctgaccagcaccccggcaaggaaaatttccaccatgcaccaggtcttgaactggaacagcacccgagccatccattctttgaggcccagtggcaagcgcactctggcgcacagcaggatgatcgccaccatgcaaaacgccgggatcagctgcacgaacaccataaacaaggtggccatgctggcgtagtcttccgccaccatgacttccgggatttggagcagccggatttcgttgccgaggccggcgacgcgcatgttgataaacgggaaaatgttggccagcaccagcatgaacaaggcgctgagcgcgtaaccgatcggccgcttgcgcggctcgttccaacgggcgctgagcgtggttttgcagcgcgggcataccgctttgctgccataggtcagcggcggcagcgccaccaacatgtcacactgcgggcaaagcgtcttatttcgagacgaaggggcgatttgctttggcgctggacgactgggtgatggcaacattgcttttctctggggtatggtttcaacttattggttatttgactaaatgaaactttctcaggaatgggcatggatgatagtttcattaagcgttcttggcgcagatgttggcagtattgagcgtgcggacttgttctgctatgtcatctatgatttggaaacgtctgcgatactctgctcgctttttgctggggatatgttccaaagattttctttcaaacgccaagggtagttgccagcgccacgaactctgttttatcccacctattaacgaccagaaatcgtcgtagctggcatgtaaatgctgacctttactcagtcgatacctcattgagcgaaaaacatgcccattgtcactaacaccataaatagcacgcacctcggtgaaattagcgaagtggctaataaactccatcaaaacacgtttggggaaaatgccagacagagcacgtgtagcatctttgatggcttcgtgcggtatgtgccgtccaggaccttgtaggccaccaatgatgagattccattcagccccttcggatacgaccgaaaaggtcacgctggcaagtaactctttattgttgccacgtaaccatagtgttgattcgccttctcgttcggctttgtgggcacaagaggcagaaatggtaaaatgggactcctctctgcctgtgaattctgccaagatcgtttcttctcgagatatcagcgcgttggacagtgctttgctttttagagatgacacataccgataatggctgacaattgccgatgcgcgttgttttgcattaaggttgcgcgtcaggtattgtcggtgcgttttacaagggaatgtgttttgatgatataatatcgattttaaatcactctgttgagttaaaatggatagtgcctttttagtcggtgaatagtataagataagccgaagtaagaactttgcacggaagctcttcttcctccatgcagggcctgggacaacctgtcccgaaagtaattcgtagataatgttttttttcaagttttatatcctacaagtactattctttaaattttacgtgtttgttggttggcggtttttctgccattttaatagataattgttaatttattgtctgctatttatcaagatttgatggagagggtgtttttaaggctaacagtatgcaattgtcgtgttttttatagcttgttgatgttttttatatggtgccatctatatggttattgatgctttctatttgaagcgcagtgattttgacattgtcggcataatgaatcacggaagtgagcttgagcttactcactcaggatgtttaataatgtaattggagtgaagtagaggcggttaggatatgattctttataatgataacgattttatcggtaagctgacttatgaaataatggggctcgtttgcagaaagcgccaccgttgaatgattattagggcggaggggggtgatatttcgggttgttggcaatggaattagaatgtaataattaagtgcgaacaaagatattggcaaggtgattttataagtaagtgtggtgatatggggttatcttagataggccgctgttttatatgaaagatagttctgtagtcgaaataagatgataaattttattaaattaaatttttttattctaatgtgtatggattgcgattttttcatgcaaatgtttcgtacgtaagagatttttgtaaaaaaatgaggatatatattttcattcagtgtcttcttggtttttctcgcagtatatgaattggtgtgatctttatgttaaaactcaattggttgtttttaatgttgcctagtgtgaattataaatggtgagcattaatgccttcactgacgaagatgtgctcatcatagagctgaaatatcgggtcgcctacgtggatccatatcgcgtcggtgatactggcggttaataacaacctgatgtagttcagtgaccggtagtatatcgcattgctacgtgtaccacgcctacctgccgtttatggccgaaaggggttatcagcaagtgatgaacctgacggtgttcggtcaggcggtgccgcagacgctgaaataatatgaacacacgttgtgtgacgatgagcgagtcgatcggctgggccgatcaatagaccatgattgatctgccgaacccattggacgctcaatagctgcgccgcctatagtgacagtgacccaaacacatgcagcaacaccagggcatcaaatcggccgctgaacggccaacatcataacgacaagcgttccccaaaccggctcaggccggttttttttgttcctacggtttagacggttcacgctgcaggtgaacaggggtgcacaccgagaaggtagctatacatccatcaatgcattgaaatataaagataaaataagaaggtgtatagggtgaacagttttcctataaatcttttttaatatggcgatcgctgggcaaacgctaattgtttataatttattctatgtattgtgcaccattttattgtgtataggtatatgtatagatttatgtttttctttataaaaaattgttttaaaacatgatgttatttgttttgttttgctcctattatcggcaccatttcaagtctcgcaatgccttccttgtaaaaatacgcagcactggcgtctgcaacgtttgcggttgatatttctgcttatcgctacgtggcaatgcgctgcaaggtataatacaaacgcgtttgtttaatcattcacacaaccagcaagcgtcgtaagcagaataatacgttgctacggttgaacctcaccgtctttttttatctggaaaaagacattgtcgccaatgttaaaccactggcttatttataaagtgaggttgttatgtgtggatgtttgatttcaagaacgaaggactttaactttaatggtcaacgttatagagtttttattgctcatgacaagcaagcgcatggcgatttaaaagcgctttactttctcgatgccaatactcaattctccaagctgaccgaccagcatcggcgcagaagtaacgataatattctttatgtcggcatcggctatcaggatggggtggatatactaaaagcaagaacccgcgactatacggttccctctgatgataaggagtttattgacggtggcggagcgccggcattttatcagtttatcaccacatgcgttaagccctggattgagtcacactactcaatcaatacagacaaacaaacgctggcaggtcattcacatggcgggcattttgtactttatacgctgttgaaccatcctgacgcgtttcaaaattatctggcggccagtccatcgatctggtgggggaatggggcgttgcttcctgatggcaagttaacaatcgctgaaagcgttaataaaataaccttgatgatcggcgagtatgaagaaaaggttcatccgcaaagtaatgaaactgaaagagagcgggtgaccagaattaatacaacacccaagttgcgagtcaggcatctggcaaaaaaactgatcgaagatgagcaacgctgtgattttatcttctgctcagggcgtcgtcatccgggtgtcatcaaggattatgcacttatggcgaatgcgatcgcggcgcataatactcaacgcgatgggctttagcgtcgtgatataatcattttttgaacacttgcaagtgagctgcttttagccgtctgcaggcattcaccagggaaactaaaaattagaacggtatgccaatatcaggcaatgaaaatttgttttaaccttatctcttacaatgactgctgcgggataatgttcgttcatctattatgcttacgagatcctgcgagcgtgcgtgttttttgagccgaaaccgagtatctgcaacctcacttcccatgcttccctctgcttatcctttcgccggttaaacaaccgtttaattaatcactgttataattacccctgttgagccttgatgggtgaatgttttcctcctcaagcagtgcgatgcggcgctctgtggagcggcatccgtttttggatatgccggtggttcggtgagaagttaggagaagtgcactatgagcagaaaagacaagctcgcggcggccctgctggccatcttcctgggcggattgggcattcacaagttttacctgggcatgaagtggtgggggctgttctacctgctgttctgctggacggggatcccggcgattgtcggctttatcgaaggtattatttatctgttccaatcggaagagaaattcaaccagaaatacaatcctggtctgatttaatgcttttctgacggcgcctcctgttaagggaagcgccgtttttcattccgttactgtttcttcatcatcatcttgccgcgcatctctttgctcatcattttattcgagctggagatgacgcagttatattgcttgccttggttaatgaccataaaggtgctgaccggatctttaaaattcttgtcgatggtgaaataaatatacgcctgcggcagcgccgccggtttaaaggcgccgaaggcatacacatccgccaggcccagcgcggagagatcgaccgtcagctccatcggtttcatggaatccggcgatgggaacatcgatttggccgacatcatcatggtgctgctgttgatggtgtaatcggttttaaccttcatgcccatatatttcgattccggcatggagagttcttttttgcaggcggcgtcgtgctgcggtgccgggctgccgttttccatcacggcgtgcacatgttccagcgtcacttccgcgttgccggtggtaggttgcgcatcggccgcgtaagccgcgccgctgaaggctgccacagaggtaaagataatgcccgtaacgattttcattgtcggtctccggaatgctaataatgatattaattgcggtgtgtagcctattggcttgataaaacgcaaagtgacccgttccatggagataaagcctcctcggaatattgttgataaaatatttccccgcccgctaaaaaacggactttttaattgctgtcagtgtctttgtccaactgcatataaatagtctgtctaaacatagtcaatgtttggaatatgcacaaattattgcagttttttttctttgtttgtgccttttgcttttaggttgagagaaatatcccatgcgatacagtgtgttgtgtttttaacgtgagattttacatgaggcgttatttatgtaagtggtatggtcacataaacgatgcgataagtgattatatattgccaggcttattattgaagttattaaagaataacgcggcgagagccgcgtttatcgatcgttcaataacggcggtatttcctggtaaaaaaagtcgatcagcgcttttaccgctggtggcactccgcggcgcgagggataaagcagtaccagctcgccgttttgcggatgccacccgcgcagcacctcttgcaaatcgccacgcgcaagcgcctggcggcaggcgtaatagggaatgccgcagatgccttgcccatcaagggcggcgcgcaggatcacctgcaaattatcgctgcttaagcggggtgagaagggcacggtgaccacggcgttttgcggcccgtagagccgccagctcggtgccccctgttgtggcgggtaaagcaaacagggcatatcgctcagctgttgtggtgttgacggcgcgccgtgtcgcgccagccatgccgggctggcggccaacagccatttggcggtgccgagtcgccgctggataagccctgcggcctcgttggcgatgccaagcccgcggacagtgaagtccaatccttcctccaacagatctatccgccgggcggtgacgtgcgtttctacgttcactttgggaaagcgcgccataaatgccggcaggagcggagcgatcacttcgtccgccaacagcggcgacgcgctgaagcgcacggtgccgttcggttccgccagcgtgcgcagcgccgtctgctgcgcctgatgcgcttgctgcatcatggcgacgcagtgcagatagacctcgcggcccacctcggtgagctgaatacgccgcgaggttctttgcagcaaccgcaggttgagttgacgttccaactgcgccacctggcggctcaggcgagaggtcgggatgcccagcgctgtgccggcagcggtaaaacctttgtgctcaaccacctgagtgaaaaaatacatggcgttgagatcgagtgtaaataccgtcatcacacactccatcatgatcatttttgcaatgatagcttctattatcgcctatttaaccctgatcgatgcggttttatcctgcaggcacaccattgttgaaacgaggataaacatcatgaaaaacctttaccgcactttggctctggccatcgccatggccggggcggcgcaaccggccttcgcggcgccggcagcgccacagccgcatactcaggcacagccggcgtccggccccttgcagctgttggatcgccacaactcggtgctgctgttggttgaccatcagatcggtctgatcaccggcgtgcgcgacatggagagcgcaacgctgaaacataacgtcgtggcgctcgccaaggcggcccaggtgatgggcattccggtgatcgtgacctcgaccggcgccaacggtcctttcgggccgatcattccggaacttaaggctgcgttgccgggggtgaacattatcgatcgccacagcgtcaacgcctgggacgacgcgaacgtgcgcaaagcggttgaggccaccggccgcaaaaagatcgtgatcgccggcgtatcgctggaagtgtgcgccggcttcccggcgatcacggccaaagcggcgggatacgacacctatgtggtgatcgacgcttccggcacgttcaatcagtccaagcatgaggcgggcatggcgcggctggtgcaggccggagtgatcccaacggattacggtacggtgggagtagagtggctgggagataacggcgatgccaaagccggcgagctgtacggcgcgctggatatgccggcgacgactttggtgaatcagctgttccaggccaagggcaaatagcgcctggagtgatagcgatatttttttcaatccttccaaccgcctgcgctagaatcaggcggttttctcttggaaaaggatatcgccatggccgcctgggcccttttgatcgtcggttgggtgttgatttggcaggatcagccgattgtcggcgtgctgtgcatcgcgctgtttgccgtgctgcaatgggcgaagtacgccgctaaaggcgcgcaagaccccgaagaggcggcagagtggcgcaagaccgactggcgttcgcagccgattgaaatggcgcacgccggtgactgtgaccggcagataggcggcgtgggggagttgggcatgggcggccccagcttttggacgctgctgctgcgcgacggggcgattgtgcatggcgcctgtgccgagccgcaggacgtggacggcggcaggttgcgcctgatcccgacccgcagccgcgagggagaggggctgacggtgtacgagcctgccgcccgggtgatgtacgcgctgcccgcgctgaccgatcgtgagcagggagccttggccgccggttccgccgaggcgctggcgcggctgcgggcgaagtgtcggcaggtggaggccacgccgttgcggcaggggcgcgggctgtgggtgccgcagtggatagaggaaccggcggatcgtctggagctcaccttgcccagcggccgcgcgctggcggcgcgtttgatgttgccgcccgatctgcgctatgcagacgatcccgccgcgctgctgcacgcaccgccttatgcgttgtggctggataaccggccgaccgatcgcttcgtgtgcgatctcgaacgcgtggcggaatccccggcgggtgatgccttcagcgtcggcggttgccagttccgcggcgagtatatcgtggatggcctgtaccacctctatttcgccggcgagtggttctgcctgctctcttatgcgcacaaacctgcaggtgggcgtggttcagacaccacctttttcgttgaacgagttgaaccgcaagacggcggcgtgttcgtgattgaatgggatgcctacagcgtggggcccgacgggcgtgagccgcgcgtgccggccccgccggtcttggttatcgcggtgagctggcaggaagcgccgctgcagctgcccacggccaataaccgcgtgaccgtgcgcctgcccaacgctacggcgtaatgcaacatggtgagctcgccggcctgcaaggcgcgcgttaatgctcacattttgattcgcttaagggcgtttcttcctgatcttgccgggagactcgccaaaataggttttacacacgcgattgaagtgtgaaacatcgacaaagcctgcccgtttggcgatatctgcgatggagagttcgtcaaattcttcggtattgagcatacgtaatgcggagttggcgcggtagttgattaacgcctggccgaaactggtgccttgattggccatcacgcggtgtaatgttctggttgaaatgccgacctctcgcgcgatatccgttgcggtcagaactaaattcatgtgtctttgatgcagactttccacgattttctgataatttctatcgcggctaaatttgcgggacaaggcatcttcgctaaccaaatcgtgatagagcagcgagagcagcatgccgatttgatccaatatcattggcggttgaaagtcgattgtgctcagataaggcggagaaatctgttccagataggcggctaatactttcccccagcctgaaagctcgctcaggttttgttcgatcattttttcgggattggcgacccaggtgttgagccactcagcaggcaacgccagcgtgcggttaaggaaaccctccggcaaaagtgaaatatattccttgcgcgtatcgagcaagattgcgctgcccgcaggcacggtgatctcttggccgtatcgattgataaatcgccatgtggcgccggcatacacgaggtggtattcgtcgctggcgctacgtagaatattctttctatcgcgctgtgagcgtttggctgaaccattaatgtcagtaatggagaattgcccggccttgagcgttgacagatggcaccagaagcgggagtgatcgtcgatggtggttgtaacgctgatcaggctttgtttcagcaggcgatcaaattcactcagccgctcttctgcaagcatgccggcagttgaccagttaaataaggaggacttgtcctttcgcattgcaccgctctccattttacgttgtccgttaacgtttatttttctcacattgcctaaaaaatgactgtctgactgggaatgttcctattgtcttttattaaagttacagcccttttcctctgtgccgtaagtcatcatcctataatgataagagataggttccttcttaagatgtaaatatcataaattatagttgattgcatcgcttgaacggggatttatcagatgatgtttctgatgtcattaaattctcttatgtaatacaaaggggattgttttaaggggcttaagtaaaccgccgtgatgataattatttcaaccggaatttgctttggatgccactcaattggctgtgagtgacaggttgcggggtaatttgacagcacattctttttctgccattggttatttgtgcaatgaagttaattaaatgaggagggagaagatgtctgacgaatttaacggaaagatcagcgagcgcgtcgttcgagaaattattatttggattgataataacttaggtggggatttgagtattgatgccatatccagaaagtcaggttattctaaatggcatctgcagcgagtgtttaaaatgcgagccggtatcaatctgggcggttatgtcagggagagaagggcgctctttgcgtactatgctttgacggaaacagatataccaataattgatattgcttttatgttaggcttcaatagtcaacaggcatttagccgagtgattgataaaacattcacgctttcacccggtgttattcgtcggctaagcagaaacggcacggtttcttttccggcattgattaataacagctattgttcaacgaccgccatgaatcccaccatgcgggtctctgtcatggagggaatgcgtaaattattaatatagttaaattctaattttaattggcgtctggtgattgccccttttgcttttgatgccttgtcactttgagcaaaaaaaatggcacgtttaaccctattaaaaaggacgctctccattagactgaaaacagtggaatgcacatggcgatcatggaaaggtaaaaatttgatttttaaatatttttttcaatttttaccgggttttaagagctgagaacccccctggttatataagaaaacgttgatttcttttaagatttttttcacaagacaagccaatttttttttcaggggggaggtaaatgattgatggagtggcttatttaatcagctttttgttaatattccgattttgtgtcttcaatttgcttctctgctgaaagagactaaaatttattctatgctttgtcatctttcagctggtcttagcgctgtagtactatacccggtccgttcagtccatttaaaggagtgagatatgtcaaagaaatatgttcgccttgataaaaatgatgccgctgtgctattggtcgaccatcaaacggggttgctttctctcgttcgtgatatcgatcccgataaatttaaaaataatgtcctggctgtggctaatttagcaaagtatttcaagctgcctacggtgttaacaaccagttttgaagttggcccgaacggcccgttagtgccggagctaaaagagatccatcctgatgctccatttattcctcgccctgggaatatcaacgcttgggataatgaagattttgttaaagccgtcaaagctaccggtaaaaagcaattgattatcgccggggtcgttacggaggtttgcgtcgcattccctgcgctgtcggcgctggaagaaggctttgatgtattcgtcgtgactgatgcatcaggcaccttcaatgaacttacgcgtgactccgcatgggacagaatgtctcaggctggcgcgcagttaatgacctggtttggcgttgcctgtgaattgcaccgtgattggcgtaatgatattgaaggattgggcgcgctgttctcagcacatatcccagattacagaaatctgattaccagctttaataaaatgagcgagaagtaatcttctaacgctcttttttgcatatatttggcatgatgcatgtgttgcgttgcatcatgctagtgttttttcccttatcgcagagctctgtgattgagcttaaatcgacaggccttttttctttatattcatccataaaagtttctgggcataggatgggaaattatgaataacaaattcagtgtgatgttcaacgcgattgccatatctctgatgacctgcggtatggcctatgcggcggatgcttctcactcgccgaaaggggaacaatcggttgttcaaacggcagaacctttcaaggcccatgttttgattaatgggcttgatgcgccctgggacatgatttgggggccggatggcgacctctgggtaacggagcgcaaggctgcgtcaatcgttcgtatcaacccgcaaacgggtgaaaagcaggtggcgatcaagattgacggcgtgcatgtcgggccgcagcatgaaggggtattggggctggcgctgtccccgaacttcatgaagccgggaggggataactatgtctacgcctcctatacctatatgaatggcaatgacgagcacgcaaaaatcgtccgtttcgagtacgacgagaaaaccaaaaaactggggaatgagaaagaaattctggcgggtttcccggcaggcaacgatcataacggcgggcgcctgcgttttgggcctgatggcaagttgtattacacgatcggcgagcagggccacaaccagggtgccaatttctgcaagaaaattgacgctcagcgaatcccgaccgaagccgagctggctaaaaaagattattcctcttacgccggtaaagtcattcgcttaaatgtcgacggcactgttccaagtgataatccggtgattcacgggataaaaagccatcttttcacctacggtcaccgtaatccgcaaggtctcgttttcgtcggcaatacgctgtacgccacagaacaagggccttcatccgacgatgagttgaatatcctcgaagccggcggcaactatggctggcctcatgtcgcaggctatcgcgacgatcaagcatatgtttacgcgaactactccgaggctaaaaattgcccgtctctgcaatgggatccgaaccatatcccggcgggcgtaccgatccagaaagagaccgaatggagcgcacctgatttcaaagcgccgttgaaaaccttctttaccgtaagagaagggtttacttataacaacgccagttgtcagggcgattcatcctatatgtgttggccgacaatcgcgccttccagcattgcgtattatcctgagaatggcgtgataaaagcttggcgcaactcggttattatcacttccatgaaaatgggggcattgtaccgagtgccgttaaatgcggataagaaggatgtgcagggggatgtgattaaatatttccacaccgcgaatcgttaccgtacggtgttggtgagccctgatacgcggaaaatctatgtagcgacagataattttggcaacgttatggatgaaaccaaccatcctacgcacgatcacagcaaccccggttcgattctggtctttgaatataccgggcagtagtcgtgaataagggagatatctgatgatatctccctgaattgagccggaatagaacggattttttggcttagctgccgttactttacataaagagggtaaacatcatgctgttatggcaaaaacctgagtttgttgacctgcgtctggggctggaagtgacgctgtacatttccaaccgttaatcgcccgtctgcccgcctttcgcgcgggcatttctttccctctttttctggttcagacatgcagataaaagttctcggctcggcagcgggcggcggctttccccagtggaattgcaactgcgacaactgccggggcgttcgcagccacagcatcagcgccacgcgccgcacgcagtcttccatcgccgtcagcgacgacggtaaaaactgggtgctgtgcaacgtttcaccggatatttgccatcagctgctggcctcgcccgaattgaacaatcccgacgtgctgcgcggcaccggcatcggcgcgatcgtgctgaccgacagccagatcgatcacagcgcgggcttgctcaatctgcgtgagggctgcccgcaccacgtctggtgcacccctgaagtgcatgacgatctcagcaccggtttcccggtgtttcccatgctctcccactggaacggcgggttgattcaccacccggtaacgcccggcgaaccttttcacacggcggtctgcccgaacgtacgctttaccgccattccattgctcagcaacgcgccgccctattcgccgtaccgcgatcgcccgctgccgggccacaatgtggcgctgttcatcgaagatatcgcgcgcggggtcggcctgctgtatgcgccgggcctcggtgaaccggacgaagcgctgatgccctggctgcgccgcgccgactgcctgctgatcgacggcacgctgtggcgcgacaatgagctggccaacgccggcgtggggcgcaacaccggcaaggacatggggcacctggcgctggcggaagagcacgggctggcggccctgctcagcgccttgcccgccaaacgcaagatcctgatccacattaacaataccaacccgatcctcaatgaagactcggcagagcggcaaagtctgaccgccgccggcatcgaagtgagctgggacggcatgaacatcgaactgtagggaatcgccatgacgcaaccacgccccctgacgccgcaggcatttgaagcggcgctgcgcgccaaaggcgcttattaccacatccaccacccgtatcacatcgcaatgcacaacggcgaagcgacgcgtgagcagatccagggctgggtggccaaccgcttctactaccagaccagcattccgatcaaggatgcggcgatcatggccaactgcccgcagccggacacccgccgcaaatgggtgcagcgcattctggatcacgacggctacggcggcagcgaaggcggcatcgaggcctggctgcgcctcggcgaggccgtcggcctgcagcgcgacgcccttctttctgaacagctggtgctgcccggcgtgcgctttgcggtggacgcctacgtcaacttcgcgcgccgcgcctgctggcaggaagccgcttgcagctcgctgaccgaactgttcgcgccgcagatccaccagtcgcgcctcgacagctggccgcaacactacccgtggatcgacgccgccggttacgactatttccgcagccgcctcggccaggccaaccgcgacgtggaacacggcctggcgctggcgctggactattgcgacaccgtagaaaaacagcagcgcatgctggaaatcctgcagttcaagctggacattctgtggagcatgctggacgccatgagcatggcctacaccctgaaccgcccgccttaccacagcgtgaccgccgcgcgggtctggcacaaccagaggctggtgtaatgacgctgaaccctgaacataccccggtattccgccgtggctaccgcctgcaatgggagccggtgcaaaacagccacgtgatcctctacccggaaggcatggccaagctgaacgacagcgccgccgccatcttgcagctggtcgacggcaacaccacgctgaatggcatcatcgcgcagctgaacgcccgcttccccggcgccgacgggttggcggacgacgtgctggagtttttccagcgcgcctacgaacaaaaatgggtgaccttccgtgactgaaccacgtgcgccggcggtgaatccgcccctctggctgctggcggagctgacctaccgctgcccgctgcagtgtccgtactgctccaacccgctcgattttgccgcgcaggaaaaagagctgaccaccgcgcagtggatcgaggtgtttcgccaggcgcgggcgatgggcagcgtgcagctcggcttctccggcggcgagccgctggtgcgtaaagacctgcccgagctgatcgccgccgcgcgcgatctcgggttttacaccaacctgatcacctccggcatcggcctgaccgagaagaaactgcaaaccttcgccgacgccgggctggatcatattcagatcagttttcaggccagcgacgaaacgttgaacgccgcgctggcgggctccgccagggcgtttcagcagaagctggcgatggccagggcagtcaaggcgctcggctacccgatggtgctcaacttcgtgttgcatcgccataatatcggccagatcgaccgcatcatcgaactggcgatccagctggatgccgacgacgtcgagctggcgacctgccagttctacggctgggcgcacctgaaccgcgaagggctgctgccgacccgcgaacagatcgccgaggcagaagcggtggtgaaacgctatcgcgagcgcatggccgccgacggcaaactggccaacctgctgttcgtcacgccggattactacgaggagcggcctaaaggctgcatgggcggttggggcgccatcttcatgagcgtgacgccggaaggcatggcgttaccctgccacagcgcccgtcagttaccgattacgtttccgtcggtgctggagcacgatctgcagcatatctggtaccactccttcggctttaaccgctatcgcggctatgactggatgccggagccctgccggtcctgttcggagaaagagcaagactacggcggctgccgctgccaggcgttcatgctgaccggcaacgccgacaacgccgacccggtgtgcggcaaatcgccgcaccacggcaccattctggcggcgcgtgaagcggcgaatcactcgcagatcggtatcgatcagctgcgttttcgcaatcagaccaactcccgactgatcttcaagggatagcgtggtgctgtcttcactgagatctgccggaacggccttttgaaaattacgccacggtctaacgcttaaggcagcaccctgacttcgccgtgctgcaaggtcagtactgcgatagggctgccggagaagcactccttaaagagccagccgctgggccgaaacgccgctgcgggcagcccggcctgccactcctcccactgcggggtcggctgatccgacggcaaagagaaagagaccagccaaccggcttcgcagtgcgccctttggccggttggacgggtgaaggtatgcgcatctgccagctccatcaccggcggtaaaacctcaaaagcgatgatcggcacgccggccacgctttgcggctgagggaagcgcacggcggttacaccgtccatcgtgatggggctgtcttcggtgccgggctggcgcggctcctgccggtttacccagcttccctttggcagggtgatttcgccgaacggcctggccgcctcgagcgtcaggtagctgcgccgattccagcgttcttccgcccgctggctcttgagatcctggatggcaatgtcgatcagcatcagcgcgaacgctaccgggtagatcgccagcgccgaggccaacagatagccgccccaggaaagcggcgggcgcgggcggccgcagcgggcggcggcatatcgccagccccaccaggcgagcaggatgccggcgagcagcagggccaataacagcgccagcaggccggcgacgccggcgccataacctaacagcatggcaagttccttatgttcacggcgtggtggagcgatagcgaatgaagtagggcagcgccggggtctccccgtcatcgccatagtggctttccggttcgatcacggtttggcgtgcgtcgtcgcgcccgttgtagcggtactccaacggctgtcggtagcgcacttcggatgagcgcagatcgaaaatcagcgaaagacgggcatcgccgttatccgtttgggcgaccagcttatcgttgcccgcccagagctgatacagcgatttatcgccggtctccagcagcaccttcaactgcccgtcggattgataacgcagaagctgatacactcctctgtccagcgtttgggcgatcaggtagatgccgccatccggagcctgcgcgctttccttgacgcgcaccgttagccaatgcagttcggccacctcgccggttttgccgttaacggcgatgtgtaacgcgccggaaccgagcaccgggttcatccagaaatgcacgcgatcaccatcaacggcggtgaagatctcgggtacggatttgcgcttaccggaggcgtaagccgtcggtgagtcctcctcgccgcgctcaaagcccagcagttgccgcgcgtccagcagcgccggcagatccagcgtctgccgccaatgggcgccgaagtccgggctgtagaatacgccttcggtgctgatgagatacagcgcgcgttttcccggttgcgccaccagtttgccgccgacaaaggaaggccggttgtcgtcgccctccggccaggggatcagcgccccgatggtgccccgttgcacatcaaccagtctgcggcccttagagagaaaaagcacgcactcctgctcgccgcaaaccgcatcatggatcaagtcgtcgagttcccccagcatctgtaacccttttgggccggcaaacagcacctggctgaggtagttggccgcccagccgtaaaagctattgtacgcgcggtcttcacttcttttgctggtgagcagcagggcgccgtcctgcgccgggtagctgtggatgagatcgtaacgggctatcgtcggcaacgcctggtcgccctgagtccattgccactgcgcatagcgttgctcaggggcgagcaaatagacgcccagcgcgctggccaaaaacagcgtcaggataataaggggtcttttataaagcgctaacgtcatcatttcagctccgtcacctgagcctgccgccataaactgcggcgcagatttctcaggtatttaaacgttttaaacgtgcggtgctggtcaaaagagtacaggcggcagatctgggcgaacccctcgatcaacagcgccaggccgctgaccatcagcatcagcagcagaataatcggcggcaattcgctgccgagacgcttcagggtccaggcatccaggtgaaagccggccggggtatcggcgttatccaccaccatcatgccgagtacaaaacacgccacgattgccccaaaaatgaagacaacgcgcgcgcacaggttaagaccggcttcggtgaagtagcggctgccgccgatgagataggtttggcgatcgcgatgattgatgatcccacgcactttgggcaactcgggaatgacgtcgttctcgcaatacagcacctgcagcggatcgcctttggcgatgaaaagcggatgttgccgacgaaataccggatgcagtttggtattggggacattgagcgcgcgggtcgtcaacgcgaagtgcgtctccttctgacgccacgcatacgtatccaaatactgcacctgccgcgggatctcatagtggcagagttcgtagttcagggcgttgaccgtctcgatgccggaggtctcgacgccgtccgggagagggggcgcggtctgcagcggtgcggtcgccggcacagcgtctgcgcggacggcccggtatttgatgccggggattttcaggctgagcgagccgggcggcgtgacgtcttgccccagcagcacgcgatccagcgcccggagcaggcgcctgcggccgcggtgtccgatcagcaggagctccgaaccgacgaacagcgccatgccgatgccgataaggccggcgatgatggcgataaagaacaggacgatggtcagccaggaatcttccccgtccatgatgaaaaaggccgccgggaaaccgccggccagcaccgcgcccagcagcagcagggcgaagtatttcagcttgtatttcagcgttctgtcaggctccagccggcctttcgtgccgtgcagcagccagtgcagccagtagctgccgtcttgcaggcggtgggcaccgatcttcacccgatcgccggcggcgagcctggccagcagattttcgctgtcgctgaagtcgtcgcggtaaaaaaagaacgtctggccggaggcgatgatcctcaccagattgtcgggcgccgtctgctggcaggcgcattgttcgacggtcacattaaaaaattgggtttgcatgtcattccctgtcagtgggcgtggcccgaaaattcatccctggcgccgggtattcagcgttttttcatcagcggcagcatgcgtaccagcgcattgtccttgacgatatagtggtggaacagcgcggcggcggtatgcaggccgatcagccagtagccgaatgacgccagcgttttgtgccagccgataatcattcgtgcctgcggccgatcggccacgtcggcgaacggcatcgacaggccgaacagataccactccttgccgcccagatagcgcgaatacacccccagcactggcagcgtcagcagcagcaggtaaatcagggcgtgcgtcaggtgcgccaggccggtttgccacttcggcggtttgggcgcgatggcgggcgaggggtagcgccagcgcaggaacagacgggcgatcatcagcgcaaacaccgttacgccgcagctgaagtgggtgacaaccagcgcgtaccagggggcgctgcccggttcggcatagccgcgcagctcgatggtgacacaggtgatgaccagcaggatcgccaccagccagtgcaggcgaatttgccacggcatgtaggtgttctgcaccgggttaccttttgatgttaaagggtctgtgtgccgatggtaactaaatgttacaggcgaggaaagcgcctgcatgcagtttaagcaaaatgccagggattacgccgcttattaagctatgaatttagtgggttaagtgcctggcgacaggggggggcagttagcatcgtaagttgtgaagttaatgcgcggtaggttcagaggctggcagcttattaagcgatgaggcgggtagcgccgcagctctcgccgcggcgcctgggatcagtttaatttggccttggcgaagtcgctgccgttcacgtccaccacgtagccgctcaggttgctgcgggtggcgtagaacactttgccggtggccagcggcagccacggcgcctgtttggcgaagatcacctgcgcctgttgatacagcctggcgcgcgcctgcggctggttctcctggatcgcctgctggatcaggctgtcataatccttatcgcaccagcgcgccacgttggcgccgctctgcacgccggcgcagccgagcagggtggcgaagttatccggatcgccattgtcggacacccagccgtacagtgcgctctgttgctcgcctttgcgcagcccggccagatactggccccactcccaggtaacgatcttggccttcacgcccaccttcgcccagtcgctctgaatcatctcggcgatgcgcttcgagttcgggttgtaagggcgctgtaccggcatcgaccagatatcggtctcaaagccctgctccagcccggcttgcttcagcagttcgcgcgccttctgcggatcgtaggcgtactccggcagtttatcattgtagcccagcatgcccggcggcagcagcgagttggccggggtgccgctgtctttgaacacggcggcgacgatcgctttcttgtctaccgcgtagctcagcgcctggcgcaccagcaggttgtcgaacggttttttctgggtgttgaacgccagatagccgacgttcagcccggtaatgtcgtgcagttgcagattgccgtcggccttgatggcggcgaattgctccggcagcggtgccgggatgatctggcattcgttggttttcagcttggccagccgggtttgcggatccggcgtaatcgagaagatcaggtgcttgctggccacgtcgccctgccagtagtgcgggttggcgatgtagcggatcagcgaatcctgcttgtactgctgcagcgcgaacggcccggtgccgatcggccagttgtcgacgtattccggtgtgccctttttcagcatcgcgtcggcgtactcggcggacaggatcgaggcgaaatccatcgcccagtcggcgacgaaggcggcgttgggctgactcagcgtgaagcgcacgtggtgctcgtctaccgcttccaccttggtgatcagcttatccagacccatgtcggtgaagtattcatagttgccgccggagaccttgtgatacgggttggcgggatccttctgccgcatcacggtgaacaccacgtcttcggcgttgaagtcgcgcgttggggtgaagtatttgttgctgttgaatttcacgccctggcgcagggtgaaggtgtaggtcttgccgtccgggctaacgctccactcggtggccagcgaaggggcgggcgttttatcgctttcgcgcagcgtcaccaggcggttgtacagcacctgcgaggtggcgataaaggtcggcccggagctggagagctgcgggttgaacgattccggcgaggcgacggtgcagtacaccagcgcatcggaagcggccagcgcgccgcccgccgacaacaggccgcagccggccagcaccaatccggcgatagggtgttttaaaaacgtcaaggcaagatcctcaggtggaatgagccgttaccggcgaattgatctaactatagataacggatggcgagatcgggaacaagcgcctcatcggtgcattctgtgcgccccgcgttgcctgccattgcggcgcagatctacactgctgggcaaacagtcactcgcaaggatttcccgatgagccactttcgccctgtcgcccttgaacacgccagccgcctgctgaaccatggcccgacggtattgatcaccagccgcagccgcgacggcgccaaacgcaacgtgatggccgccgcctggtcgatgccggtggagttcagcccgccgcgcatcgccatcgtggtcgataaaggcgcacacagccggcaaatgatcgaggagagcggcgcattcggcatttgcgtgccggcggccatgttcattgacgccacctacgcggtcggcagcgtgtccgggctggatgaagacaaattttcccgtttccatatcgccgcggcgccgagtgcagcgctgcaggtgccgctgatcgaagagggttgcgtggcgtggctggagtgtcggctgctgccggaaagcggcgcgcaggaaaaatacgacacctgcttcggcgaggtgttgagcgcggcggcggacgagcgggtgttccagcaagggcgctggcacttcaccgccgccaatgcggatctgcacaccattcatcatctgggggcgggcaacttcgtgcgcagcggcgagacgctgcgggccaaaccgctttaatcggcctcgcgtttgcggtctgcatcatagcgctcgcgggcggcgtccagctcggggaagtggtattccgcccacttatccagcgccgtcagtgtctcgaccagcgagcaggcgacggcgctgaggcggtattccacatgggcctgattcttttcacttaaatccagccgctcgagcagcccgttgcgttccagctggcgcagcgtttgcgtcagcaccttctgcgaaatgccgtcgatgcggcgcagcagctcgccgttgcgcatcggccgctgcgccagcgcgggcaggatcagcatcacccacttgccggaaatcagcgccagcgcatcgcgcgcggagcacttgctcgaatagacgtcgccgggataagccattgggggttaccttcaggtgcgtaattgccaagggggcgataaagccacagcataacagcaccaccttacaacgggagaaacaggatgaacgtgctgattgtgctggctcaccccgagccgcattctttcaatgcccatttggccgaacaggcgcggcaggcctggctggcgcaggggcatcaggtgaaaacggtcgatctgtatcaggaggggtttgatccgcgcgagggcgccggccactaccccagcagaaagcaggcggaccggttcgatgcgatgcaggagcagcgccatcactggacgatccaggcgctgccggcggagatccggcggcatatcgagctgctgcgctgggcggatacgctggtgctgcagtttcctttctggtggttcggcgcgccggccatcatcaagggctggatggatcgggtgttcgtttacggcgggctctacgacagccgccaccgccatgagaacggcgtgatgcgcggcaagcgggcgctgctggccgtcaccgccggcgcttccgcacaggcctgcgcgtcggacgggcgcgacggcgacatgcggctgatgctgtggccgatcatgcatgcgctgcactatatcggctttagcgtgctggagccgttcctggtctatggcgtgcgcggcgggctggcgggcaaggagcggcaggcgcaaaacgccgcgttggcgcaggtgacgcaggcatatcgggctggaataagcgaccttgccgcctggccggcggtgccgttcaaccgtaatgaagattttgacgccgatctggcgctgaagcccggcgcgccggtctacagtccgttcgtgcggcaccgagatccggcttagaatccggccttcagcagttcctcgcgcaaatcgtcgataatcgccggttcgatgtcggggaactgctgctgaatatcggcgatggcttcggccacgctcgggccggcgaaggtgccggagaagggcagcagcggcagattggcgtcgctgtccggcagttcaccgcggatggtgccggtgatcatgcccgcttttttttccgccgtgaggtcgtactcccccacgcttttgtcgatcggtttcattggccgcctcgctgtcggtgagtgttcaccctgttctgttaaagcatagtgtttcaggcaatgaataccaatcaatgtatataatattaatataaaacaaagtgatgcgtattttgtcgtttgacgttcaacggcggccggcgctatgctcttggcgctaaaggaaccttcctcactgacagggacagacgacatgaaaagactgaaaagcgcggcgctgctgttgccgctgttggcgctcagcgcctgcactcactccctcagcagcgcagagcagcatgccaaacactacgtttatcaaacccgcgacgacttcgatccgcaattccgcaccgatgtgaacggcagcattaaaaacgccgtgccgatgttcgaacagttctatcagcaggggaaaaaggatcgcgcggcgggcgtggcgcgcagcgaagcgcagaaaaaggccgactacctggccagcgcggaattccagcagaacatggaacacaaaaccattttcatcaatcgcgcctacagcagcaccgacaatcctaaacgccgccaggtgctgtcgcaggaagcggtgggcgcctattgggacggctacgaagggcgctgacttaatcccacataaacagaaggtaataaaaactggccttctggcggttatttgattataaaaaccgccgctaaggacgatgttcatagaagaaaccaggagtgtttatgttggcaaaagttaagcgttcgttcgccgccgccgtcgtattgatgttggcgctgcccgcagtgcaggccgcggattaccgtgcgggcgagcaatatacccggctggataagccggtggccgccgcgccggcggtggtggaatttttctccttctactgcggcccttgctatcagttcgccgaaacctaccgcgtaggcagcaccgtcgcgcaggcgctgcccgccggcgagaaagtcaccaaatatcacgtcagcctgatgggcaagctgggcaatgagctgaccgaggcatgggcggtggcgacggtgctgggcgtggaagacaagattgaaggcgcgatgtttgacgcggtgcagaaacagcgcgccgtcaacggcgccgacgatattcagcgggtgttcacggcggccggcatcgatgccgccacctatgaaaacgcgcgccacagcctgctggtcaaagggttgatcgccaagcagaatgaagcggtgaaagcgttcgaggtgcgcggcaccccgtcgttctacgtggcaggtaaatacaagatagataatgccggcatggccagcaccagcgtcgaaggttacgccaaagagtacgcggcggtggtgcgccatctgttggacacgcagccttaaggcgatgcttccccggcgcccggtgatctgtgatcgcggcgccaaatcccccgttcgccattgattgtgtgttaacggattgttatggtgtttttctgttcaacggcgcagcaccgctgttgtttgaagggagagatcatgacggcattggcaacgctccgggacgtcggcttcgaagagtggctggggaaaatcaacaccgcctgcggccgattctgcgcgaaaacgttggggcccggctttcgcggggcgatgcaggagtttcgcgcccatgccctgcgcctgagcgtggtcgacgtgtctcaggcccggttgtaccgcacgccgcgtgagatcgcccgcagcgacggcgcgcactttttcaccgtcatccagttgcgcggcagtgcgttgatggagcagggcgatcgccaaacgctgctctcccccggcgacatgacgctgatcgatgcctcacggcccagcagcttcaccttccagcgcgattcgcgccaaatatccctgttgttgccgcgcggctgcctgccgctgccgccgcctggtgcgcaacgtctcggggccgagctcagcgcggtgcgcctcagccgccagctggtgctgagcagcatgcaggatcctcagctcgccgcggcggaaagcgaggcggtgctgaatgcgctggcggcgctgctgcgcccggcgttggcgctcgaacaggcgcgtccggaggggcagcaaccggtcttcgacaaggcgctggcgttgatcgacaggcatattcagtcggcgcagctgcgccctgagtgggtggcggccgagttgggggtgtcgctgcgcagtctgtatcggttgttcgcccgccaggggctggtggtggcccagtacatcaggaaccgcaggctggatctgtgcgcgcaggcgctgcgcagcgccgccgggcaagaaaagctggccggagtcggcctcgactggggttttgccgatcacagccatttctcgaccgctttcaagcagcgtttcggcatgtcgccgagcgagtaccgtcggcagtatcagtaagccagggcgcgggccaggcccgcgccgcttcactcaatagcggatgcagaccgatttggtttcggtgtaggcatccagccaatccgggccgaaatcacggccgctgcccgactgtttgaacccgccgaacggcatgttcgggtcgatcagcgtatgggtgttgacccacacggtgccggcctgaatgcgcggcgtcagcgccatcgcctgctgcaggctggtggtccacaggctggcggtcagcccgaagtcggtgtcgttggccttgctcagcgcttcttcggcgctcgccacccggatcaggttgaccaccgggccgaacacttcctcgcgcgtcaggttcagccgatcgtccgggttgatcaccagggtcggcggaatgtagaagccgttggcgtccggcccggccgcgccgccgataagctcggcgtttttcgcccgggcgtcgtccaggtaggccgccaccttgttgcggtgcgcgagcgacaccagcgggttgatttgcgcgccggtatccatccccggcccgaccgacagcgatttcaccgcctgttcgaatccggccaccaaccgatcataaatcggcgcttcgatatagattcgcgagctggcggcacacacctgcccctggttgaggaagctgccgagcatcaggccttcgatcacctgctgcggatcggcatctttcagcacgatggccgggtttttgccgcccagctccagcgtcacgcgggtcaggcgatccgccgccgcgcgcgcgatgcttttgcccaccggcgtggagccggtaaagctgactttggcgatcagcggatgttcggtcagcgccttgccgcatacggtgccgcggccggtgaccacgttgaacgcgcccggcggcacgccggcttcgctcgccagttcggcgatgcgcagcagggtgagcggggtggtttccgacggcttgatgacgatggagcagcctgcggccagcgccggcatcactttccacatgccgatcatcagcgggaagttccagggcacgatgccggcgaccacgccgatcggctctttgcgggtataaacctgatatttggcgcccggtggcatcggaatggagacgtccagcgtctggccggtgattttggtcgccagcccggcggtgtagcgcatccagttcagggtgctgccgacttcgaaggcgcgggcgatgttgatggatttgccctgttcaagggtttcgagctgcgccaattcttcggcgtgctgctccaccagatcggcgaagcgcagcaggatgcgttcacgctctaccggcagacgctgcgcccagacgccttcgctgaaggctttgtgggcggactgcaccgccagcgcgacgtcgtgttcattggcgtcggcggtggtggcgatctgctgcccattggcggggttgtacaccgccaggcggccttccgcggcggacgcgcgccactggccgtcgatatacagcccatgctgacgatcgagaaaacgcgacacgctatccagcacggctacggtattgtcagacatacatcctccgatcaggctcatcaggttatcgttaaccctgcaagtctagatcagtgggaaagcggcggctttggtctgcctgacattcggtttgtcctgcgtgtcattttgccgtgacgggagagtaaaccgcggccggcgggcgccggccgggagggatcacgagctcagggtcgccagacgggtggcgaaaccgaggaacagcaggccgatcaggccgttgccgagcttcgccaggcctttcttgtggttgaagaaatgcgccagcatcgcgccggagaagatcagcgtgctcatgtagataaagctgacggcttcgaggatcagcgccagaatggtgaacgacagcccggtgtgcgcgtagttgaagtcgatgaactgcacgaagaacgacacgtaaaacagaatggctttcgggttggtcaggctcagcgtcagcgacttgcgcagaatgctgtggccgccttcaatttgctgctgttgcgcctgtgccttctgcacgaaggtggcgtagaggatttttgcgccgaggaacagcaggtaaatcgcgccgagaaaacgcaccagggtaaacaggaacggcgtggtgcggatcagcgacgccacgccgatataggcgcagaagatcaggatcgcatcgccgataaacacgcccagcgccgcggtgtagccggcgcgcacgccgcgcgatatgccggttttcagcacgtacagcgtattcggccccggcagaatgatgatgaagaccaccccggccaaataggtccataaattcaggacgccaaaactctctaacacaataacctctccatgcgcgcaactaacaggcaaaaacactggccacgcccgtggccggccgcgatcctaacgccgtgcaagcgggttggcaacgtaataaacttcatgttgttggttaaaaattgtcgaaacattgttgaaaacgtcggcgtcgaattaaaaagcaagagtcggcgtgtttcgccaacggcccgtcactatgctggttaacatcgaaaccgcagtgaggaacggatgatgaaaaacgtaatcgacagcgccgatccgcgctggctggcgatcgtcagccgcgacaagcacgccgacggccgctttatctacgcggtgaaaaccaccggcgtgtattgctcgccttcctgcccgtcacgccagccgaatcggcaaaacgtggagctgttcgacgatgcggaacaggcggaggcggcgggttatcggccctgcaaacgctgccgccaggggctgacgccgttgacagagcagcatgcgcggcagatagccgaggcctgccgctatatcgaacgggcggagaaagcgccgtcgctgcagacgctggcgcgccacgtcgggttgagccaataccatttccaccggctgttcaaagcgatcaccggcctgacgccgaaaggctacgccgacgcgcagcgtagccagcgcttgcgcaccggtctttcgcagcaggagacggtgaccgacgcgatcttcgacgccggctatggcgccaacggccgcttctaccagcaagccaacgccgcgctgggcatgacgccgaaggtctaccgggcgggtggcaaaggcatgcgcatccatttcgccgtcgggcgctgttcgctgggcgatatcctggcggcgcagagcgaggtgggcatttgcgccattctgctgggggacgatgcgcagcagctggtgcaggatctgcaggataaattccccaacgccgagctgatcggcggtgacgcgcagtatgaagctctgatggcgcaggtggtgggcctgatcgaagcgccggagagcgggctggcgctgccgctggatattcgcggcactgcgtttcaacagcgggtctggcgggcgctgcaggcgataccggtcggcgaaaccgtcagctatgccgatatcgcccggcgcatcggcgcgccgaaagcggtgcgcgcggtggccggcgcctgcgccgccaacgtgctggcggtggcaatcccctgtcaccgggtggtgcgcaacgacggcgccttgtccggttatcgctggggcgtcgagcgcaagaaagccttgctggaaaaggaggcgcagcgatgagcggcgcgctggcggcgcggttggccgaattggactgggcggcgatcgaacgcgaacttgatgcgcaggggggcgcgcgcctgccgggcgtgctcagcgccgagctgtgccggcaattggcggcgctttatccgcatggcgagcacttccgcagccgcattgtcatggcgcggcacggttttggtcgcggcgagtaccagtattttgcgtatccgttaccgcccccggtggccgaagtgcgcggcctgctgtacgcgcggttggcgccgttggccaatcgctggaacgccatgctgggtctggcggcgcgttatcccgccgaacacgaggcctacctgactgaatgccatcaggccggccagcggcggccaacgccgctgctgttgcgttacacggagggggattacaactgcctgcatcaggatctgtacggcgaacgggtgtttccgctgcaggtagcgtttttgctctccgcccctgaacgggatttcaccggcggcgagtttgtgctgaccgagcagcggccgcggatgcagagccggccggaggtggtgcccttgcagcagggcgacgcggtggtgttcgcggtgcatcatcggccggtggcgggggcgagaggctactatcgggtcaatctgcgccacggcgtcagccggatacgcaccggccaacgccacacgctaggggtgatctttcacgacgcgttatagcttgcgcgccagcagggtggcgaagcgcagcgagatgcggttgccggcggcgtcggtcttgtgcagttgcccgacgtcctcgttgtatttgaggatctgccagtcgcggtaatagtgcttcagctcgcccggcttgaaggtgaacgggaacggcagcgggcagggataatcttcggtatccatcgccgccacgatcagattatggccgccgggcacggtgctgtcctgcatgttttgcacgatatgcgggatctgctggcgctcgaggaacatcaacaccacggtggacaggatgaagtcgtactcgccgctgaagcggtgagtattgagatcctgcaccccggcgctcaggcgggtcagctgctcggcgtcgatgatctgattgaggcgagctatcgacggcgcgtgcttgtcccaggcggtgacgtcgaaacctttcagattgagatagagcgaattgcggccgccgccgcagcccagatccagcgccttgcctggtgcgatgcgcgccgccgcctcaaccacttccgagtgggtgcgcgtcagttcgtatttcttgtggtagtaatcttccggcgtgcagtagaacgccagccggcaggtcatgtcgtccgagaaggaaacgatgcgatgccactgctgcggttcgataaacggcggctggctttcggggctaaactgccaggtctcggtggtagcgccgtcttcggtcatcatggcgaacgtcaggttgccgctcagcacggtgagcttcgcccaggtgccgctctgggtgttgtggcgctggcgaaaggcttccggcagtgtgtcgctgttccattccggcagggttttatagcaaagcagctgctgctccatagggggctcctctggctgggcaaacaaagtgatttatatgatgtatataaaatacatctttatcgatcgtttgaacatagcggcctgacggaaaggcgcggcgatatctttatactggattgtgcgcggcggctgggctaatttcagtgctgttcatgtcatcacgttcagggaaaagatgccgatatctcgtttattccacccgatgcccttccgtttgctgagcctggccgcgctgctggcgctggcgggctgtaccagcaaaaccaccaccacggtgccggcggcgcgccccgccgacgtcaaagcccgactgatgacgctgatcccggccaacgccggcgatcgtcagggctgggccaccgatattaccgccgccttcgccgcgcagggcattgaaccgagcgatgagaacctgtgttcggtgctggcggtgaccgaacaagagtcgacgttccaggctaacccgcaggtgccggggctgccgaagatcgcttggaaagagatcgaccgccgtgccgatcagatgcacatcccgaactttttggtgcataccgcgttgaagatctcgtcgtcgaacggccagagctacagcgagcgtctggataaggtgcgcacggagaaggatctgagcgatatcttcgatgacatgatcgaccgcgtgccgatgggacagaagctgttcggccatttgaacccggtacataccggcggcccgatgcaggtgagcatcgccttcgccgaggcgcacgccaaagggtatccttatccggtcgacggctcgattcgccgcgaagttttcagccggcgcggcggcatgtacttcggcattatgcatttgctggggtacccggccgattacagccggccgatttaccgctttgccgacttcaacgccggctggtacgccagccgcaacgcggcgttccaaaacgcggtcagccgggcgagcgccattccgctggcgctggacggcgatctgatcgatttcagcagcgacaagcccggctcgaccgagctggcggtgcgtacgctcggcaagcgcctgaacatgagcgacagcgccattcgccgggcgcttgagaaaggcgatacggctgactttgccgataccgacctgtataagaaggtctttgcgttggcgggcggcaagctgccgcgtgagatgctgccgggtattcagctggaaagcccgaaaatcacccgcaagctgaccaccgcctggttcgccaagcgggtggatgaacgccggcagcgctgcatggcgcgtgccggcgggtaacggtatgaaaaacgccgccggtggcctgaaccaccggcggcgcgatgatcgcgcctcaggcgctgcggcgcgggttggtcaggccgaagttaaaactgttgcagcggttgcagaactctttcatcaccggcggcgtgtccatcatcggcactttcacctcgataaacgccagccgatcctgccgcgaggcgtgttccagggccatttccagctgttgtgtggtttccaccgccacgctgaacggctgcgcctgggtattcaataccgccggcagtttggcgtagtcccacgggctgatgtcgttgtaggacgagttttcgccgaggatatagcgttcgatagtgtaaccgtcgttgttgatcaggaagatgatcggcttttgttcgcagcgcagcagggtggacacttcctgcgcggtaagctggaaggagccgtcgccgatgaacagcaggtgacggcgctcaggggccgccatcagggtgccgagcagcgccggcagggtataaccgatcgagccccaaatcggttggttgaccaccttgacgccgtccggcatgcgcatgccgccgatggccgcgccggaggtgccgttttccaccaccaccacgtcatccgcccggatgaagcgttggatccgccgccacagataggcctggtcgataggcgcgtcgctcggcgtcgccagcttgtcacgcggatcggccagcggtgataaaaactgcgccggcgcgtcttcgctcagatccagcagcgcctgcagcagatccgccgtcgctaccgccgggtaggaggtgttgtccaacgtcatcgagaacggctgaatatccacctgagcggcggcgggaatttgctgcgagaaatagccggtggtggagtccaccagacgcacgccgaaactcagcacgcagtctgagtgggccatgcgttcatacaattcggggcgcgacaggttgccgctgtagccgcccatccagccggcggtgttttccgggataatgcatttggcggttggcatgttggtcagcggtatggcgaagcggtgagcgacatcgataacctgctgctgcaactggtagcgatccaccatttggtcgaccaatatgatcgggcgctgcgcgcgctttattttggttaacagcgccattgccgccaattgcacattgtatttatcgctcgccggcaattgcggcgctgctgcggctgcggtgatttcaatttcgacgtcgcaaatatcagacggcagctgtaaatacaccggtttcttctctatccaggcgcgagaaataacgcgtggaatttcctgcgcggcattttccggcgtgataagagcctgagcgacggtgaattgtttaaagcagttcatgacgttgtcgaaattgccgtcgcccagggtatggtgcaatagctgatgattcttcatcgcgtgcagcggcggcgtgccggcgatgcagaccaccggcgaagattcggcataggcgccggcgatgccggacagcgcggccagatcgccaacgccgtaggtgacgatcagcgcgccggcgcctttcatccgtgcgtagccgtcggcggcgtaggaggcgttcaattcattgcagttgccgacaaacgccagccgctcgtcgttttccagcagctccagcaggctgaggttatagtcgccgggcacgccataaatacgatcgacgttcagggcgtgaagctgttgcagaatgaatgacccgatagttattttcattgattgctccggattatttatctttattttgtcaggcgaaaatcagcaaaaataaattgctggcgatgttgtgtcgttagcattaacagttatttaaagtgtcggcttgttcaagatagggttggcagccggaaaatgggcggtttgtattcggcgctttacgcgattgagtaatacataaaaagtaggggtattgcgtattggcgtgcggcggtatttttccttgatggaatatcagcagagaaacggcgccgcgttggcatttatcatgacgcagggggagttacccggtacttttgatgccgcgttaaatcctgcctggcggcacccggctgtgagtctgagaaagaaaaaccgacgctgacgtaaagggggattttggtgatccgccgcacgcttatttcaagaaactatcctgcaaccaattaaaaacaaaaaattaacaatgaggtttttttattcggtcatggttgtcagttttgctttacagatgccgcaatgcgcgccacgtcgggccggcgttaaaatacgccgtcacgggcgctaatataacgtggcggtcgtcacattctgtgggaagtgatacgtaaacttttctctacgtgcgcacggatggcgtatacctaccagaggggctcatgtcccagcggtgctggcctgagaggggggcgtgtgatgaaaggctatcgacacattctggtactgattcacgatgagcgcgatgggctgccgttgctgcgtaaaacggtggcgatggtgggtgggctgccgatcgccatcaccgtcggccaccttaacgccgactatgcggagctggagtacggcagcgatgcgctggtcaaagatcgccaggcgcaggaggtgatcgccgccaaggcgatgctgagccggctggtgagcgccgtcgaggcgccggttgcggtcaaggaaatcgtcactatccggcgctttaaggacgtcagcgatttcattcatcaggccggtatcgatctggtggtggtcgggcaccaaaatcgcctgttcggtctctattcctcttattccctggagtttgtgaatcgtctcgatgtcgatgtgttggtcaagcaccttgcccgcgagtcgtgtgcgacaaagcggacttttcccacggctttgccgcccgaaaggcgatagcatacgcaggccggtgcagcctgttaaaagttatcgggaattttccggtgctaaacttaaccaaagcacaacgggcgttggataaattagatacagcttgatcttgcctgggctatcggtaaaaatctgcggccgtatttttacaggagctttacgatgtttctcaaacggactcttttggcatgttctctggcgttgatatttcctgcactgccttcttacgctgaggttggtacagaaagtggcaataccgcgcaggctgaaaaaccgggtctatggcagcgttttacccataacgtggcggagacctggaacaactcgcctaaccacgatctctatatcccggccatcacctggcacaatcgttggacttatgatgatgagcatatcgataagtacaacgaacgcccgtggggcgccggttacggcatctcccgctacgacagcgacggtgactggcacggcatctacatcatggcgttcaaggattccttcaacaaatgggagccgatcggcggctacgcctacgagaagatctggcgcccgctggatgacaaggatttccgcctggggctgggcttcaccgccagcgtcaccgcgcgcgacaactggaattacatccctatcccggcgccgctgccgctggcctctatcggctatcagcggctgacgttccaggcgacctacattcccggcacctataacaacggcaacgtgttcttcgcctggctgcgctggcagttctaaacttcctgaattccgaaaaacggcgcggtggcgagataaaaggaacttgtcgccgcaggcggcgtcggagaggtatcccggcgcgctgcgccgattgcatgccgttatgacaggagtttcaccactatgatcaccaaacatcgtttattgctggctttggcgctgtccgcgaccctggccagcggcgccacccaggccgccgggctgatggattccctcagcagcgcggcgggcgaactgagcaagtcgggcggcgacagcagcggcggcatgtcgctctcctcgttgaccggcctgctgaacggcggcgacaaggcgttgagctccagcagcatgaccaatgccgccggtatcctgcagtactgcgtgaaaaacaacgtgctgtcggctaacggtgccgaaggggtgaaagatcagctgctcagcaagctgggcatcaccagcaccgaaaacgccaagagccaggattatcagcagggcctgggcggcttgctgcagaccggcgaaggcaagagcctggatctgaacagcctgggcacctcgcagatcaccgagaaggtgaagcaaaaagcctgcgatctggtgctgaaacagggcaaatcctttatttcatgatcaaagaacggcggagcgctccgccgttcgtttttgtataagctggaaaaatgaaaaaaacgttgatgctttccctgctggcagggatgacgatgttgcaggggtgttccgtgaaatccaacgatgcgccgccaccgccgcaggtgaaaccgatcggcatggcgaacccggccgacgtgtactgcacccaaatcggcggcaagctgaacgccaaagagaatgctgcaggccagtattctacctgtaccttgccgagtgggcaggaaattgaaagctgggaactgttccgccgcgatcatccggtgaaaaagtaaccctatgcggcgccggctctgctgcccggcgcccgctcagaattggcgatcgcctatcggctgcagctgcaggctgccgtccttctgcagcgtcagcggcatgcgccaatcacgctgtttatccaggttgaacggccgggagcggaacatgcagccggtcttgatattcttgattttcatcacgtgttccgcgttcgcattgattttcacctcgaagctgccggcgggcggaataaagacttccgccagctgttgcggcgccgctggcgtttccagcttgaccagcaccgcgaaatcgttgccctgattatccaacgtcagccgatgcaggccggatgcgggcagccgcgttggctgatgcagataacccgctgaagcgggccacggctgcccggcattgtcatgcagcggcccgccgcactgttcgcgcgcctcccgcagcggcatttcgcgcttgatggcgcgattgtaatcggcgggggcggcgagactgaactcgtcgtcatattggtgggcgcgcagatagcgcttggcgccgagcaccccaacggcgaccagcatgaagaacaaaaatatcctcaggcgatttttgaaaatcagcccgaacagcttcccggggagttgaaacagccaccttgcgatcgtcaataacatcgttttcccttagcgtccaagccgttacgtctgcggtaacttcgcttgcctcagtatagccaacatcccgcaggcgaaaatcctgcccggcgatttttcttccgctctgcattgtacgtttgtgtttgtttgtgtacatttgtgatcactttagcgtcaccggattgaaatgatgtccaaactgttaccgaatgagcgtcaccaggccattcttgacacgctccgccaacaggggcgggtgctggccctggagatggcgcagcggctgaacaccaccgaagcgaccattcgccgcgatctgcgccagctggcggcgcagaacctgtgtaaacgcatctatggcggcgcgttagcgccgacgccggccgaaggccccgttgcggcgcgcattgcgctcagcggtgacgagaagctgacgctggcgcagaccgcgctgggggtgatcggtgaagaacagctgatcttcctcgacgccggcagcacccacctgtatctggcggatctgttgccgcgcgaccggcgtttgacggtggtgaccaatgcattgagcatcgccggcaaaatgctggagcggccggggatccgcaccatcctgatcggcggcgagttggatgcgcaggtcggcggctgcgtggacgccaaggccgcggaagagatcgacggtttccatttcgatttggtgtttaccggcatctgcgcctacgacccggccggcggcttctccgcgctgagctaccaggacgccaccttcaaaaagcggctgttgacgcgcgccggcagcgtggcggtgctgtgcacccgcgacaagctcaatacctacgccccttaccccttcctgcccgccgggcgggtggatcatctggtgacggcgcgcggcgcgcacccgcagcttgagctgcaggtggcgcagggcggcggccaggtttggcacagcgatttaccgaccggagaatgatgatgaaaatagcccatgttgctctgtggacccgtgacatcgacgcgcagctggcattttggcagcgttatttcaatggtgccgcgggggaggagtatgtcagccgcaaccggccggggttcgtttcccgcttcgtcagcctggcggccgggccgtcgctggagatcatgcgcgtgccgacgttgctgccggcgcaggagcaggaggagcgggtcggttgggcgcacatcgcactgtcgctcggggatgagcggcaggtcgatcggttggcgcagcgcgcgcagcaggagggcattttgctgtccgcgccgcgctggaccggcgacggcttctacgaggccgtcattcgcgatccagacggcaacgcgatcgaaatcaccgcctgatcactcttcttcaatgctggcgaattgctcgcccagatagtcgagcagcagccgcaccgccggcagcaggccgcggcgcgacgggtaaaccgcatgcaccacgccgccctgcggctgccagcccggcaacagttgcaccagctcgccgcgcagcatgtcgtcgcgcatcatcatcgccggcagttggacgatgccggcgccggcgatggcagcggtgcgcagcatcagcatgtcgtctgtgaccagccgcggcgtgtgctcccactccacccgttcaccctgcgggccgctcagccgccattggtgctgaccgcgcgcggggccgagatcgagcgtcgggtatttacgcaggtcttccggcgtgtgcgccggcccgagggtgcgcaccagcgccgggctggcggcgacgcaccaggtgcgctgcgccaggattttcagcaccagatcgctgtcctccagcggcggcggccgcacccggatcgccagatccaacccttcccccaccacgtccacccggcggttggtggcctccagatgcaccgtcaccttgggataatcggccataaaggccgccaccatgctgccgacgcgggtgtgcaggatcgccaccgggcaggacatgcgcaccgtgccgcagggctcggcgcgcgtctgctcgatcgcctgctgcgccgcttccgcttccaccagcatcgccttgcagtgcgcgtaataggtttggccgacctcggtcaccgagaagcgccgcgtcgagcgctggatcaggcgcacgcccaaccgctcctccagcagcgccacgcggcggctgagcttggatttgggaatgcccagcgcccggccggcgggggcgaatccctggtgatcgaccacgctggcgaagaaaaacagatcgttcagatcggtcagcatcgtatcccttatcgttctatcagtagaacgctgagtgtacatcttgcctactactgcagcaaaccccggcggattaaacttctgacatcaacttaaggccgtgaggtctgaaacgggagttcaagatgaaaaaaatcctcggtattcacaacagcccggaagcacactgggtcggtaacggtttcctggtgaattcgctgttctcttataacgatttgggggcggaaatgagcccgttcctgctgctggatcacgcggcgccgaccaaattccgttccgcctccggcacccgtggcgtgggtcagcacccgcatcgcgggtttgaaacggtgaccatcgtctatcagggcgaagtggaacaccgcgactcgaccggcagcggcggggtgattggccccggcgacgtccagtggatgaccgccgcctccggcatcctgcacgaagagttccattcgcgggacttctcgcgcaacggcggcaccatggaaatggtgcagctgtgggtcaacctgccggccaaggacaaaatggccgagccgggttaccagacgctgctgaacgccgatattccggtggtcccgctggcggacggcgcagggcaggtgcgggtgatcgccggtgacttcggcggccatgccggcccggcgcgcactttcagcccgctcaacgtgtgggatatgaagctgaatgccggccataccaccacgctgacggtgaaagaaggccatacgctggcgctggtgatgctgcacggcgcgatcctggttaacggcgaagatgtggtgcgtgaaacccagatggtgcgtttcgaccgggcgggggactcgatcactatcgaagccaacaacgacgtcgcgctgttggtgctgagcggcgaaccgatcgatgagcctatcgtcggctacggcccgttcgtcatgaacagcgaagcggaaatccagcaggcgttccgcgatttcaacagcggcaagttcggcagcatgaacgccgaagcgagcgccggttgaaccttggcatctggggcgggaagtgttctcggttccagatgccacacttaaacctcaacgccccgccacaccggcggggcatttcatccgcaacatcaaaccccacaggagtaaaaccatgactgcaaattacaaacgcctcgacaaagatcaggccgccgtattgctggtggatcatcaggcagggctgctttcgctggtgcgcgacatcgatcccgatcggtttaaaaacaacgtgctggcgctgggtgatttagcgaagtatttcaacctgccgaccattctgaccaccagttttgaaaacggccccaacggcccgctggtgccggaactgaaagcccaattccccgatgctccctttattccgcgccctggccagatcaacgcctgggacaacgacgacttcgtcaaagcggtaaaagccaccggccgcaagcaactgatcattgccggcgtggtgaccgaagtgtgcgtggcattcccggcgctgtctgcgctcaatgaagggttcgaagtgtttgtggtgaccgacgcctccggcaccttcaatgaactgacccgtcagtcggcctggagccgtatggaagccgccggcgcgcagttgatgacctggttcggcgtcgcctgcgaactgcaccgcgactggcgcaacgacatcgaaggcctgggcacgctgttctccaaccatattccggactaccgcaatctgatgaccagctacaacacgctgaccaacggtaagtaacgcgacggccctttactcaacctttcgcctttcatcacgttagacgcgggatgtaagcaaagcgcagcggggcgaaaaggtagcgaaaagcggctttctcattggccgggggcggggtagcgtaatcccgaacccggcaaatgaggctaattcaatgaaacaagcaatcaagatcctggcgctgccctgcatgggcatggcgctattgttcagcgcgagcgcgatgtcggcgcctgagaagcctgcggccaacgcgttgccgcctttgatggatgcgccgatgcgcatgccgcctttcccgggcgggcacccgcccaagccggggttctgccacggcggcgagctgttctgcgccacctcggccagcgacaatccggtggaaaccatcaacaaactgacggcggtgatcccggcgggcagcgccaaacattacgaagtgcgcgtcgcggtggtggccgtgcctgacgcaccgcctgcgccttaacgggccctgtcatcccgctctggcctgggcgcaccaggcgcgttaggctaaggagagcgtttttcgggaggcgggatgacccctttatcacagctgccttatctccagcccggcgatcgcgtgctgttgttcgacggcgaatgcaatctgtgtcacgggctggtgagatatttgattcgggccgatcggcaacggcgcattctgttggcgacggtgcaatccgtcgaaggacaggcgatcctgctggcgttggggttgcagaccgatcgtttcgattccgtggtctatgttgagcaggggcgttattggctgcgttcggcggcgttgtttcaggcgctgcgccaattggcttggccataccgcgcgctggcgctggggcgttatctgccgtcgaagctggcggacaaggtgtacgacgcggtcgccggcaatcgctaccggctgtttggccgcaacgacggcgccggtctgccgggtgccgatcagcccgggcgctatctgccgcggcgacgggaaccgccggcctgagctttacgcttctttaccatccaaccgcttgaaatatcagcactccagctccatataatggaacattcaaccaacaaggagcgcgtatgggaatcagtgaagaagagcgcattcgccgtttgacccaggagaaaaacgacatgggcaatacggcgaaatgggtggcgatcgtttccgccgtgtactttgccttgatggtgttttacggccacccgaccggcgtgttggcgatgtcgggcgcggtgttcatcgtgtcgaccaccacctggctgaaaaagcgtaagaaggtcaaatcttatcgcatggcattggccagaatcagcgacgatcagccctgatagtcgccgcgctttagtgtatacaccaggctcggcgctgcgccgggcacgtcatccagcgtatccacccgccgcatgccgatcttttccagcactcgccacgacgcctgattctccgcgcgcacaatggcggaaatttcctccatcgccaatccgacaaaaccatattgcagcgaagcccgcgccatctcggtggccaaccccatgccccagacgcgagtatcgaagcgatagccgaggttcacggtgcgctgtgcgccgagcggtttccaggacaatccgccaaagccgatgatccaatccggccgttcgcgcagggcgatcgcccaggaaccgtaaccgtgttgttgccacccggaaattctctcttgcagcgccgagatagcctgcgcttcgctggtgagcgggccggcgggattgaaacgctgggtttgcggatcgccgaagatggcgtagaagcgttcgagatccgccatcaccggcgggcgcatctgcaggcgttcgctgaaaaaagggtctgaaggagtaaggctcatcatcgtttctcccggctggataaatgaacagtgttcactgtagaccagattggtgaaacggggaatccccctctgcgggtgagagggggcgaagggaattacaggaaggagtcgtcgtcgtcgctgtaatcgtcgtcggcgtaatccgtgtcgtcctgatagctggcgttctggaagccgttgtcctggttcaggaagttgccaccatcgccgttgttgaaggtatcaaggttgttggaggcgtcgaaattgcgcattgcgctgtcgtccagcggcgccggggtttcctcgataatatttacgatttcctgtggttgcgaatggcggaacatgccggtcagcatgtcggccaacaccacgccgccggcgacgcccgccgccgtttgcaaggcgcctcccaggaagccgccagcgcgtgagggcgccgcctgctgcggttgggcataggcaggctgctgctgcgcgtagcccccctgctgcgcgttgttccaggccgccgtattttgctgctgcgcctgatactgttcacgcgggcttggcgtgcggctgccgccgccgaacagaccggccaggaagccgccgctgctctgctggccgttggcggtttgctgcagctgcgccacctgggcctccagctctttgacccgctgatccatctgcttgagcgccgcttcctgaatgatcatcgcctgcgccatgtaataaggggcggaaggctgctcgcgaatatgctggttgatttgctgctctgcctggagatcccgtgggcccgtcttggtctcggcttctttcaggcggccaaacagaccatcgataaggcgttgttcttcggattgcataggagtacctcaggagataaataacggtgctggatgatcattatcatccgtaacaatcaccctagcgcgtttacatgaaccaataaataaatggcgggtaaacttgcctatgaatttgttaccaattgcggcagcgggatcagcatcaccagcttcagaccggcgtgctctgccgggtggaaggtgagctggcgatagcgcagcgcgccttgctgaggatgctcgaaggttctttcgccgccttcgcgcgccatgacgtcatgttgcttccaccagtgattaaagtctgcgctgttgtgcgtcatgttgcgcacgaaggcgcgcatctcttcggtattttgatgatggctggtctcggcgcgaaactcggccaccacgcggcgcgcgcgctcttcccaatcgctgaccagcgttttcgccaatgggtggaagaacatgaagtgcagcaggttggggctgttggccacatccagccagccgctgaacagcgccgccgcctgcgggttccaggcgacgacgttccaggtcacgtccagcaggtagcagggcaccgtcatctggtgcacgctttgcagcaccgcgtcgttggcggtttcgcggtgtgtttcctgctcggggtcggcgatgcgcgccagggtaaacaggtaatggcgttcggccgggccgagccgcagcgccttggcgatgcgtgccagcgtatagggggaaatggatacctcgcggccctgttcgatccaggtataccaggtggcgctgatgccgctgatttgcgccagctcttcgcgccgcaggccgctggtgcgacggcgcgaggagctgggcaggccgagcatttccggcgtgatgcgttcgcggtgcgcccgcaggaacgcgccgagggcctttggcccggataaggcttctgatgacatagcgtggtacctatttataccaggataactgctcatattgtacccgtatagtagcctgattatagtagccgaaagccttcaggcacaggcgcaagccggataataacgggagcaaacatgagcatcagcaacagccataaaaacgcggtagaccggcagttcggcgagcaggccaacgcctacttaaccagcgcggtacacgcgcagggcaaggatttgcaacgccttgcacagttactggaaccgcacgccggcgcgcgcctgctcgatctgggctgcggcgccgggcatgccagcttcacggcggctgccagggtagcgcaggtggtggcctacgatctgtcggcgcaaatgttggcggtggtgaagcaggcggcggcggaaaaaggcctgaataacattcagcagcagcagggcgtggcggagtctttaccgtttgaagacgccagcttcgatctggtcatcagccgctattcggcgcaccactggcacgacgtcggccaggcgctgcgcgaggtcaggcgggtactcaaaccgggcggcagcgcgatctttatggacgtggtctcgccggggcatccgctgctggatatctacctgcaaaccgtggaagtgctgcgcgacacctcgcacgtgcgcaactatgcgccgggcgagtggctgacgttgctgaccgaggccgggctgatggtacgcgaagtgacggcggatcgattgatgctggagttcggcagttgggtggcgcgtatgcgcacgccggcgcatttcgtcaccgcgatccgcgcgctgcagcaaagcgtgtcggaagaggtggcggcgcatttcgccattcagccggacggctcctttaccagcgatatcatgatgtttgaagtgacgaagggctgaaagcaacggggcagccgatgaaggctgccccgtgaaacgcaatcgactgcgatacgcttattttttgtcttccagcaggcagcggtagatcaggccgccgataatgccgccgaccagcggcaccagccagaagacccacagctgctgcagcgcccaggtgccctggaagatcgctacgccggtgctgcgcgccgggttgacggaggtgttggtcaccgggatgctgatcaggtggatcagcgtcagcgtcaggccgatcgccagcggggcaaagcctgccggcgcgcgcttgtcggtcacgccgtgaataacgatcaggaagaaggcggtcagtaccagctcaatcacgatcgcggcttgcagagaataaccgcccggtgagtgttcgccgtaaccgttggaggcgaagccgcctgcggtggcgtcgaaaccggctttgccgctggcgatcaaatacagcaccgccgctgcggcgatgccgccgatgacctgagcgataacgtaaggaataacgtctttcgccgcgaaacggccgccggcgaataagccgacggtgacggccgggttaaaatgcccgccggaaatatggccgacggcataggccatcgtcaccacggtcagaccgaaagcgagcgcgacgccgaggaaaccaatacccagctgtgggaatgccgctgccaatactgcgctaccacaaccaccaaacaccaaccaaaatgtgccaaaaaattcagcaaaaagtcgctttgacatagattccatcctgcggaatagactaacgggcgttagcactaaaaactatagaacagctttttgagttcatgcagatattctatagaattttcttaatgcaccttgaataacggcggtattaaatccccggtattttattttgtctatgagaaaaacaccgtttttccacgtgccgacgcgcgtttgccgatttttttatctttgctataagaatttaccctaagcaaaatggcgggctattttcgggtggttttttccagcggttttatccattcaatacgctcaggttaattgctaatttctatttgccagccaaccttattgcttgttttacatttgacgaagcgcctgttgtcatctaagtgtcatgctaaattaatatcttcttctgcctgataacgcttcattcaacctcgggtaaaaaacatgagaataaaatcgctctccctgctgttggcttcgctgtttccggtattcacctacgctgcagatattgaggtggcgcgttatgtggtcggcttccccggcggggaacgcgtcgcctatcagggggcgtttgccaagcatttcccgcaggggttgccggtggggatcggctcagggctgtcgttcaatcgcaagcagggcgacgatctggtgctgacgacgctgaccgatcgcggcccgaatgctgatgcccctgcggtgggcaagcaagaagccaagattttcgccaatccgcaattcacgcctctgttgatggacattcgtatcggcggcggcaaggccgtggccgagaatgcgcggcccttgcatgacgaaaaagggccgattagcgggctgccgctgccgagcgagctgattggttccacgaacgaagtggcgttgaacgacgcgctgcaaccgctgtctggcgatcgccgtgggttggataccgaaggtatcatcggtgacggcaacggcggctattggctgtgtgacgagtatggcccgtttctgatccatgtcgacgacaaaggcaaaattctcgccaaatatggcccaacgccgcaggccggcgagcaggcggtggcgagcggtttgccgaacatcctgaagtggcgccagcctaaccgcggttttgaggggctgacccggatgccggatggacgcattctggcggcggtgcagagcacgctggatgttgatggtaaaagcaaaaacaaggcgcagtttacccggctggtgagcttcgatccgcgcagtggcaaaactgcgatgtatggctatcccatcgatatcgaccgctataaaaaagccaaagacgccaagattggcgatatcgtggcgttggacaaccagcgcatcctgttgattgaacagggaaccgataaagataagacgatgatcaacaagatctatctggtggatctcgcgcaggccagcgatctgagtacgtttgacggccagggtaaagcgctggagttcgacgatgcgcaagagctggctaaacgcggcgtgaagctggcgcagaaacgggaagtggcggatctgcgccagttgggctggcgccaggagaaagcggaagggttggcgctgatcgacgatcgcacgctggcggtgatcaatgacaacgatttcggcttgcaggcgaagctggtggatgcgtcgccaaagagcaaaaaaatcggtgactaccagctggagaaaggagggcggttgagcctcgacggcgacaagaccgatgcccgtatcgaattgcgccctctggagcagccggagtcgctgagtgagctctgggtgctcaccttgccgcaacccttgaagtgatcgagaaggggcgacagcgcccccgtcagaccgttgaaaaaggaggaaaaaacgtggtttttcctcctttgtggccatcagccgaaaatcaataaattgattttccttgtttttttatccgctgctctctgcaaacccggcaatggcatgaggtttgtcatcaatctcacagcgggggcggtgacgcccccgtttgcttcaggtctccgcgtgccgctgcggcgctctgccgcgcgagatgctctcccacaccgccaccaccaccatgatcagcgtcgtcaggccattgaccatcagcagatcggttaaataggcggcgggggccaataccgccagcgtcagcagcccaaccaggtgcgacagcgggaagcggcgatacaccaaccgtttatacagcgcgttggcgaacaggtaaatcgccgggccgagcagcagcaccgccgccgtggcgtgttggatgcggccgtcaggatgggcgatcaccagctcgttggccacggcgcagacgatgatggctcccaccagcgcgacgtgcacgtagtggaaataagcgcccagctggccggggttttccgcctggctgatggcgtggctgccggctttgctgctggtgtcgaagtaaacccaccacatcgccaggctgccgagaaaggccaccagcgaagcgatgagcaccggcaggctccagctttccatttcgctcagggtggcgccggtgatcagaatggtttcccccagcgccacgatcacgaacagctggcagcgctccgccagatggtggccttcgatggtccattcgctgctgctgtccgagcgccccagcaccggcaggcgaaaaccgaacatcggcgagacgtattcgcacaagacggcgatcgcccacagcgccaggcgagtatggccttccgccagcccgccggcgatccagaagacggcggagatgcacagccagccgaggatgcggcgaaagttttgtttcaacgggtggccaggcgccagcaggcgcaacaccgtgacagagcggccgacttgaatagcgacataaaacagcgcgaagatcaggccgcgctcgccaaacgcctgcggcagcgcggcggcggcgaacagccccagcagcatgatcgcgaacagcagcaggcggatctggcgggtatccggattgaaccagttggtgacccaggcggtgtattgccaggccagccagacggcaaaccacagcagcagggtttccagcgcgccggtcagcgtcaggtgatgcaacagatagtgggaaagttgggtcacggcgaaaacgtagatcagatcgaacagcagctcggaaaatgagaccgaagcgccctgaccgtcacgcacgcgcagcaggttttgcgacataagcgttcttccttaaaagggtaagccacaaaatcagcgtagctcagcgcgctccggcgggtaaaaaatcttaaatagacgcggcgcgcatgctttatctcgcaccgtctttaattgttcatcaaataggggtaaggtgaggtctataaagtcattcccgcctgaaaatacacacccgctcttacttcctccttattctcctcacaatgattgatgttctttacgttgcatgacgtccgttttcattggctagcggataattaacatcactgaccacgagctaataaacaagaacacctggagtcaatcatgaaactcatcccaagcatcgcagccgtattgatcgccgccgcttctttctccactttcgccgcgccgctgtcgtcggtgaaacaggtcaacagcgagcaggccgccaatctgcaaagcatcggcgtcgtgtcggtttccggcattagcggctcaccgcatgatgccatcaccgcccttaaagaaaaagccgcggcggacggcgccagccattatcgcattatcggtctggacacccccggggattccagcaactggcgcggcaatgcggaaatttatcgctaagcattggtttttttacgctctggccgcggcaacgcggccaataaaataaacggtcgcaataattatctgaatagtcggtgtataaacgatttattctcaggtcattattacggccgtttttctttgcgtgccgttgatgaggttgcattttattacaactgtgtctgccgctttcggaatcatgttaatgattacttaagaaattcggctcacattgagggcttaacccaaggaggcctcaatgttaaatgcgacccggctgcaactgatgaatcacttcgcttacctgcagcaatttatggcttcaccgcgcaccgtcggtacgctggcgccttcttccccgtggctgtgtcaggcgatgctgaatcaggttgaatggacccgggcgctgtcgatcgcggaactgggcgcggccgacggggtgttgaccaaacgtattctggggcggatgcgcgccgatgcggcgctggaggccttcgagatccaaccccatttcgtgcatcggctgcgcgggatagacgatcggcggctgaaggtgatgggccattcggcgacccggatggccacggattacgacgtggtgttttcctgcctgccgctgctgtcgatcccggtcaggatcagcgtgcgcattcttcagcaggcccggcagcggctgctggcgcgcaacggcacgctggtgctgttccaatacagccacctgtcggaaaaattgctgtcgcgctattttcactggaagcgcctgcgggtggtgcgcaacttcccgccggcgctggtgtatgtctgtacgccgcgttagctacagcgttttcgccatcaccaccacctcttcgtcatgctgccgccggcgctccagaggttgccaaccccagccggcgtacagcgcttccgacttgtcggtgatgagatgcagaaccgagtgatggcgttgccgcgccgcctcgacgatggccatctccagacagtgggcgatgcccttgcggcggtgatcgggatgcacgaagacgccggccagccacggagtgagatcctggcgctgatgatcgtcgctgggccacaggctggccatgccgaccggacgatcgccgtcgatcatcatcagcgtcaggtgatcgtcgcttggccggctgcattgggcgaaacgcagctgggtgcgcgccagcgaaccgccgcgctgtgacccccattggccgaaagcccaggcggcgcacacatcggcaaactgcgggcactccgacagcggaatgatgcgttgagtcatggaggtctcccggtttttttgctgtttccccctcctatttaaccgatttttccgccatttttttaactttttaaagccgctattttagcggtttcgccgtgtttgccgcgcgcccggcgccgtttcccggatttcttttggcaatggcggcgtgggattgcaagtgctaatgagagtgattatcatgcgcacactatttcccccgtttcggctcaatcatgcgcacttccctcattttactgctgctttccctgtggttcggcatgttctccgcccaggcgaagacggtaaccgacatcaccggccgccaggtcgcggtgccggacaacccgcagcgcatcgtggtgggggagagccgcatgctgtatacgctggcgctgctggagccgggcaacccggcgcagcgcatcgtcggctggccggcggatctggcgcgctttgatgcgcaaagctggcagctgtatacgcagaagtttccacagatagcccagatccccgtcatcagcggcaataactttcgccaggtcaacatcgaaagcctgctgcagctgaagccggatctggtgatcctggcgcgctacgcgcgtgaagacggcgacaacgatttgctggtttccgcactgagcaaggccggcgtggctgtgatctacgtcgatctgcgcatcgatctgctgaacaacaccgtgtcgagcgtgcggctgctgggcgaagtgcttaatcgccagcaacgcgccgagcagttcatcgcgttttatcagcagcatatgacggtgatccggcaacggctggcgggctatcaggggccgaagcccaaggtgatgctgcacctgcatctggggcggcgcgacacctgttgcaccaccgccgcgcacggcaacctcggcgatttgctgaccttcgccggcggcgacaacatcgccaacgccagcgtcaaaggggtgtatggcgagctgaacccggaaaccattctgagcgccaatcccgacgtgtacctcgccaccggcatggctgggccgcagggcaaacggctgtccgatctgcgcctcgggccgcaggtcagccgacaagaggccgccgacagctttcgccaactgatcgccaaacagccgatgctggccagcctgcaggcggtgaaaaaccaccgcgcctggagcgtctggcacaacttttacctcagcccgtaccatgtcgtgttggtcgagatgttcgccaaagcgttttacccggatctgttcgccgacatcaacccgcagcagaccttccaacagctgtatcagcagtttttgccgttacctttttcagggacctattggagtcagttagataatgaataacaacaagcgcggctggtggtgcgcattgcctttggcagcctgcgcgacatcgccggcgtgggcggcggaaaaagccgcgccgcaggaagagagcctggtggtggtcggccgcaaagacgccgacggcgtgcagagctatcagccgttgaccagcgttaccggtacccgcagcgaaaccaacctgctgaacgtgccgcaggcgatcgacgtggtgccgcaacaggtgattaccgatcaggcggtcagcagcctggacgaagcgctgtacaacgtcagcggcataacccaggccaacacgctggggggcacccaggacgcggtaatgaaacgcggcttcggcgacaaccgcgacggctccattctgcgcgacggcgtgcgctcggtgcaggcgcgcaactttacgccgaccaccgagcgggtggaggtgctcaaggggccggcctcgatgctgtacggcatgggcgagccgggcgggatgatcaacatgatcaccaaaaagccccagctgcagcagcatacccacgtggaaggctggggcagcagtttcaacggcggcggtggccagctcgacgttaccgggccgctcggcacgtcggggtttgcctatcggatgatcgtcgatcacgatgaaaccgattactggcgcaactttggccgcaatcgccagacggtgatcgcgccctcgctgatgtggtacggcgagaacaccaccgtgcggttggcctatgaacatatggaatatctggtgccgttcgatcgcggcaccattatcgattcgcgcaccggcaaaccggtgaatacgccgcgcgatcgccgtttcgacgaggcttataacgccacccgcggcgatcaggacagcgtcactctgcagatcgatcaaacgctcaatgagcgctggaaaagctcgctgacctacgcctacagccgcaacagctacagcgacaaccaggcgcgcgccacggcgctggacccggagagcggcgcattgagccgccaggccgactcgaccgcccatgccgtcagccacgccaacgcggtgcagctgacgttcaatggtgacgtggactggggcagcatcaaccaccagatgctgttcggctttgattttgaagataaccgtacctaccgcggcgacatgatccgcggtaaaaagaacagcgatttcaatatctatcatccggtatacggcctgatgccgccgtcgacggcggtcagcgccaaagacagcgaccagcgggaaaacctcaccagctacggttggtttatgcaggattccatccagctaaccgataaatggctgctgatgggcgggctgcgctacgatgctttcgacgtctatgccggcaaggggcggccgttccagaccaataccgacagctcggacggcaagctggtgccgcgtgccggagtggtctacaagctgacgccttacgtgtcgctgtacagcagctataccgagtcgttcaagccgaactcttccatcgccacccagattgattcgctgccgccggagcagggcaagtcgtgggaagtcggcggcaagctggcgctgccgaacggtgttaccggcacgttggcgctgttcgacatcaccaagcgcaacgtgatggtcagtgagctggtggcgggcgaaaccgtgacgcgcaccgccgggcgcgtgcgttcgcagggcgtggagctggacgtggccggtaatctcaccgactcgctgagcctgatcggttcctatgcgtataccgacgcacgggtggtggacgatccggacaacaagggcaaagagatgaccaacgtggcgcgccacaccgcctcgctgttcctgacccaaaacctgggcagcccgggtctctacagcggcgatgaggtgcgcattggcgccggtgcgcgctacgtagggcgccgcccgggtgacgccgccaacagtttctacctggataactacaccgttgccgatgcgttcgccgcttacaccatgccgatcaacggctatcgggtgaaatggcaactgaacgtgaagaacctgttcgataaaacctactacccatccagcggcggcaatttgcgcgtggcggtgggggaaccgcgtgaggtggtgctgcgcggcagtgtcgatttctaagccacgggcggtgaaatttgcttaaataaccgccccaacgttaaggagaacccatgagcctgcagattcgtttggcgcagcagcgggatatcgcgcatctgatggcggttgaacgctcggcggcgcagttgtttcgccaacagccggaatggcgctttattgccgaaggcgaggtgatggccccgcagcagcatgccgcgtttatcgccgagcgccgtgaatggctggcggaaagcgacaacggcgagtgcgccggtttcatcgccgtgctggctcagggggaagattggcacatcgccgaattgtcggtcgctggcacctggcagcggcagggcgtcggccgccgcctgatcggcgcggtggcggaagaagccaaacggcagggggccggccgcctgacgctcaccaccttcattgaggtgccgtggaatgcgccttactaccggcggctgggattccggccgcttgagggcgcgcagctcacggccgccttgcggcggcatctggatgaggatctggcgcacggctttgccgtcggcagtcgctgtgccatggaatttacactatcgtaaatattgaaatacagagcgggcagggtatgatgctgccaccacgccatcgcacccgctcggcattttggtatgcaatgcactcaagtcaccgcataagggacaacccgtaatgacacaaaccctgttcatgataggcgctcgcggagccggcaagaccacggtaggccgcgcattggcgctggcgttgggctatcaattcgtcgataccgatctgtttatgcagcaggcggcgcagatgagcgtggcggaaatggtcgagcgcgagggttggctggggttccgccgccgtgagaccgtcgcgttgcaaaccgtgactaagccgtcaactatagttgccaccggcggcggcgcgatcctggcggaagagaatcgtcagtttatgcgccagcatggcaccgttatctacctgcgcgcgccggccagcgtgttggcgcagcggttggaagagtacccggaagatgcgcagcgcccgacgctcaccggcaggccgatcgccgaagagatgcgcgaggtgctggccgcgcgggaagcgctgtatcaggatgccgcacattacgtgatggacggcgccgccgatccgcagcgggtggtggaacaaatcctcgcggtgctgccgcgtgagacggtgaaataaccttttcttctcttcgggcgctgtgcgcccgtttttctattccgtttgccgagcggccgcaaagtaggccccgggcgtgacgccgaagcggcggcgaaaggcggcgatgtaggcgctgacgttatcatagccgcaggcgtcggccacctcgccaaccgctttgccgcgtgataacccctccagtgaacgcaatacccgcgcctgctggcgccacagcgcgaagctgatgccggtttcctgcagaaaacggcggctcagggtgcgcgggctgagcccggcccagatggcccagtcgcgctggctgcgcgggctggcgggatcgttcagcagcgctcgggcgatgttcagcaaccgggcgtcctgcggcagcggcaattgcaacggcgcgcggcttgccgcgtgcatttcgtccagcagcacctgcagcagccgccgttgcggcgcactcagcgggccggcggggaactgcgcgatgcgctccaccagggcctgcaacaacgcagaggccgtgaacagttgcggcagcggcggcatctccggcacgctttccatcggcagatacaggctccagcccgccacgtcgccacaggccagcgcctgatgggcgcatcccggcggcagccagcccagcgtgccgccggtgatcgcccattgccggcccgggagttccattgccagcatgccgcgcgtcaagagatagatctggccgccttcgtgccggtgccagggcgtcaggtgctttttttcatgctgaaggcgttggctgcggatctgcgtcatgttggccgtttaacgttattgaaagtcttgatgtggttattatgccatcgcctggccgggataggatcgccgttcaccctatttcggagaaatgtgatgactcaacttaccccgctgaatctggtgctcgatacgctgcagcagatcgtcgccagcccggagcatcggccggcccagctcgccgcccgcttcagcgcaggctaccgccagcaggtggatggcaaggtgctgcacttcgagcagtttgagcagcatatggcgctgctgaagcggcaaactcgccgcatgacgctgagcgtgatcgcggcggcggagcagggcgaggcggtgctgacccaccatctggtcgaggtggaaaagcgtgacggttcccgctgccgcgtgcgggtgttggcgcacttcaccgtgcgtgaagggcgtatttgcgcctgcgacgaattgaccgagctgttgacgggggctcccggcgatcgcgatcttggttcgcgcgtgtcggaatgagggcggctgctatacttgctactgtgtgaaacacacgggagaacggcatgcgcgaaaatgatcaacctgcttatccacggagtgcccgcgtcgtagaggtgtttcggggggacccgaacctgcatctgcgccgttttgaagtgcgcaccgacgacattgagccgaatacgctgctcagtgaacatgaaaccgagcaggaagcgctcgacgccaagcaccgctatgaagacgaggcgctagagcactgacctgcagcccagcggaaaccggcgtcaggccggtttcctgtttatccccccgcgttagcacatatttcccagaacaatattgataatgataatcatttatgtgatttttatcgcccctattgggtgtttcacttctgggaaaagagatgtccaattccgagttgcaggcgctgtttctgcgccatatgcggccgctgcaagcctatttgaacgccaaactgcgcgaccctcagctggccgcggatttggcgcaggaaagttttacccgccttaccgagcaatatccgcagggtaacattctcgatatcgaagcctacctgtataaaaccgccaaaaacctgatgttcgaccatctgcgccagcagcagcggcggcagaccgaagcggtcgaagacgacattctggcgcagtatccctccggtgaaccggcgcttgaacaactggcgatcgatagccaattgctgcagctgttgcagcaggcgctggcggacatgccgccgcgcacgcagcagattttccgccttaaccggctcgatggcctgacccaggcgcaggtggcggcgcagctgggcgtgtcgctcagcacggtggaaaaacacctggccagcgcgctcgagcggctgatggcgcggatggaagaacaataatggcaatttttttacgggtttatccgcgctcagacgtcttaacctataaccagaaaaaacagaggtctatgccattatgaaaccgctaaccgcacaggcgcgacagcaggcggccgcctgggccgtgagcctggccgaaggggcgctgccggccgatcggcggcgagcgttggacgcctggctggccgccgatccgcagcatccggcggcgctgcgtcaggctcgcctgctgtggacgacgctgggacagctgccgcctgagcagcggcaggcgttacaaccgcaggtggcgacgctgaaaacgtcatcccatcgcaggtggccccgctgggcggtggcggcggcggtggtgatcgccgtttccttcggcgtttatcgcgggccggatctatggattggcatgcaggcggattaccaaaccgttcgcggcgaggtgcgcgaagttgcgttgccggacggcagccgggtggcgctggacagcgacagcgcgatcgcactggcgtattccgcaggcgaacgcaaggtgcggctgcttagtggcgccgcctattttgtcgtcgcgccgttgggcgggccggaaagtcgcccgttcagggtggaggcggaaaacggcgtcacccaggcactgggcaccgagttcagcgtggcgcgcaccgagcagggcgtcgacgtcagcgtgcatcagcacagcgtgcgggtaacgcttgagcgcggtgagcgttcgctggtggtcgcgcaacgccaggcggcgcattaccgcaacgggcagctgcagctgacgcggcaaacggccggtgatgacgcctggcggcgcggctggctggtgatcgaccgccaaccgctgacgcaggcgctcgcgcagctcaaccgctatcgcgagacccgcatcgtagcgatcaatcccgaactcagatcgcgtacggtcagcggcgtgttcgcgctcaataaactcgacgacggcgtcggcgccattcgtcaggaactctccgcccgccagctgaatctccccggcatcacgctgctttactgagcggtgcaggcgggccgggatgcctgtttcgccgctattttcactttctgtaaaaaatctttacgggtttttgcctcccggaacgtccttatgtttaaacgagattgatttccattatcacttggtttgacattctttcgggtggaacacacacgcatgcttattcacaagggaaccacgccggccggccgcttggccacggcggtacgcgccgcgctggcggcgatgatgttgactcagccggctgtggcgctcgccgtccaggctgaggcgaacggtgcgcaggccgcacagcaaaagcatttcaacattgcggcgcagccgctgcagagcgccatgttgcgcttcgccgagcaggccggcatgcaggtgtttttcgacgaggtgaagctcgacggcatgcaggcggcggtgctgaacggcagcatgagcgttgaacagggcctgaggcgcttgatcggcggcaatccggtggctttccgcctgcagccgcaggggcagatcgtattgagccggctgccgacggctaacgtagagggcggcgcgctggcgctggacagcctgacggtgctgggcgccggcggcatcaacgccaacgattgggtttacgacgaaccgcgctcggtcagcgtcattagccgcgaacagatggacaaccgcccggcgcggcacgcggccgatattctggaacagaccacgggggcctattccagcgtcagccagcaagatccggcgctgtcggtcaacatccgcggcatacaagactatggccgggtgaacatgaacatcgacggcatgcggcagaattttcaaaagagcggccatggccagcgtaacggcaccatgtacatcgattctgaactgctgtccggcgtgaccatcgacaagggcaccagcggcggtatgggcagcgccggcacgctcggcggcattgccaccttcaataccgtcagcgcgagcgatttcctggcgccgggcaaagagctgggcggcaagctgcacgccagcaccggcgataacggcacccacttcatcggcagcggcatactggcattgggcaacgaaaccggcgatatcctgctggccgccagcgaacgccacctcggcgactattggcccggcaataagggcgacattggcaacattcgcatcaataacgacaccggcaattacgatcgctacgccgagagcatcaagaacaacaaaatccccgacacccattaccgcatgcactcgcggctggccaaggtgggctggaatctgcccgccaaccagcgcctgcagctgagttatctgcagacccagaccgcatcgccgatcgccggcaccttgactaacctgggcactcgcccgccctacgaactgggctggaagcgcaccggctacaccgacgtgatggcgcgcaacgcggcattcgactacagcctggcgccggaagacgtcgactggctcgattttcaggccaagctgtattacgtcgatactcaggatgacagcgacacctacagcaccagttcgctgctggacaacggctacgcgacgcgcacccgtctgcgtacctatggcgcacaggcgcaaaacacctcgcgcttcagcctggcgccggggcatgacttccgcgccaattacgggctggagttctattacgacaaagccaccagcgactcttcccgccaaggcatggatggggtgacgccggccggcaaccgttcggtagccagcctgttcgccaatctgacctatgactacgacggctggctgacgttggaaggcgggctgcgttacgaccgctatcgcctgcgcggccagaccggtctgagctacgccgacttcccgtatacggcggagaatccctgcaaacagctgcggctgcgcaactgcctggcgacgaccacgcagcaggagtggaacgccgatcgcgatcagggcaagctgtcgccgacgctggcgctggcggtgcgccccggcgtggagtggctggagctgtataccacctacggcaaatcctggcggccgccggcgatcactgaaacgctgaccaacggcagcgcgcacagcacctctacgcaatatcccaacccgttcctgcaggccgagcgctcgcgcgcctgggaagtggggttcaacgtacagcagcctgacctgtggtttgagggcgatcggttggtggccaaggtggcctatttcgacaccaaagtggataactacatcaacctggcgattaaccgggacaagccggggctggtgcagccgagcatcggcaacgccgcctacgtcaacaatctgtcgaaaacccgtttccgtgggctggagtaccagctcaactatgacgccggggtgttctacgccgacctgacctacacccacatgatcggtaaaaacgagttttgctccaggaacgcctggctgggcaatcgcctgcgttacggcgccaactcccggccgggcaacttctacgcggagcaggatccgacggcgaatgacgccgtgtcctgcgacggcggctcgcagttcggcaccgccgcttacctgccgggcgatcgcggttcggtgacgctgggcggccgggctttcgatcgcaagctggacgccggggtgaccgtgcgcttcgcgccgggctatcaggacagctcggtgccgtccaactacccgtatctggccgactggccgaaatacaccctgttcgatctgtacgccagctacaaactgaccgacagcctgacgctgcgcggctcggtggagaacctgaccaaccgcgcctacgtcgtcagctacggcgagacgctggccaataccctggggcgcggccgcagcgtgcagggcggggtggagtaccgtttttaagcagtaaaagggcgttgctcatcgttgagcacagaggtcgcctcgcaaggggcgccgttcatcaatggagatagagaaatggcattttcagtcaattatgacagcagtttcggcagctacagcatccataactatctgaacgagtgggcgtcgtcgtttggcgatatcaaccacaccaacggtaatgtcaccgactccaacagcggcggtttctacggcggcagcctgtccggcagccaatatgccgtgaccagcaccgccaacaacatcacctcgttcgtggcgggcggcaacctgacctacaccctgttcaacgcaccggcgcacaccctgtacggtcaactggattccctgtcgttcggcgacggcctgaacggcggcggctctacaccgtacaacatccaggttcctgacgtcagcttcggcggcctgaatctcagcagcctgcaggcgcagggccacgatggcgtggtacaccaggtggtgtacggcctgatgtccggcgataccggtgcgctggaaaccgcgctgaacggcatcctcgacgactacggtctgagcgtcaactccaccttcgatcaggtggcggcggcgacggcggtgggcgtgcagcacgccgacagcccggaattgctggcggcctgatcgcggccgtttgcccgccggcgccgcgtgccccggcgggcgttttctcgtttttagccgatggaaaacgccatgaaaaacgccgtcaggcgcggagaagtgatgagcgtgctggccgcataccggcgcggattttggggcattgcgctgtttaccgcagtgatcaacctgctgatgctggccccggcgctgtatatgctgcaggtctacgatcgcgtgttgccgtcgggcaaccgcatgacgctggcgatgctgaccctgatggtggtcggcctttacctgtttatgggcctgctggagtgggtgcgcagccaggtggtgatccgccttggcgcccagatggatatgcgcctcaatcagcgagtctacgacgccgccttcgaaaccaatttgaaaaccggcaacccgctggcggggcaggcattgaacgatctgaccaacctgcgccagttcgccaccggcaatgcgctgttcgcctttttcgatgcgccctggttcccggtttatctgctggtggttttcctgctccacccctggcttggcgcgttggccagcgctggggtgatcgtgctggtgctgctggcctggctcaaccagcgggtgtcgcaggcgccgctggcggaggccggccgcgtcgcgctgagcgccacgcagcaggccaacggcaacctgcgcaatgccgaagccatcgccgccatgggtatgttgaccgacttgcgcctgcgctggctgcggcagcatcagcagttcctgctgctgcagaaccgcgccagcgagaaaatcgccgcggtcaccgcctggtcgaaaaccgtgcggctggcgctgcagtcgctgatgttgggctgcggcgcgctgctggcggtcaacggcgacattacgccgggcatgatgatcgccggatcgatcctgatcggcagggtgctggggccgatcgatcagctgatcggcgcctggaagcagtggtcatcggcgcgccagtccctgcagcggctggaggtgatgctggccgctaacccgccacgaataccgagtctgccgctgccggcgcccggcggtaaattggccgtgaatcagttgaccgccagtgcgccaggcggcacggcgcctgtgttgcacggcgtcagttttcgcctggaggccggcgaggtgctgggcgtgattggcgcgtccggctccggcaaaaccctgctgatgcgccaactggttggcgcgctgacgccgctcagcggcgacgtgcggctggacggtgcagacattcagcagtgggacaagcaacaactcgggccgcatatcggctacttgccgcaggatatccagctgttcgccggcaccctgacggataacatcgcccgctttgggcaggtcgacgccgagaaggtggtggccgcggcggcgctggccggcgtgcatcagctgatcctgcatttaccgaaaggctatgagaccgagctgggtgaaggcggcagcggcctgtccggcggccaacgtcagcgggtggcgctggcgcgcgcgctgtatggatctccggcgctggtggtgctggacgaaccgaacgccaacctcgatcgcgaaggggaaggggcgctgcagcgggcgatcgaagcgctgaaggcgcgcggcaccaccatcgtgttggtgacccataaaccggcgatcctggcgaccaccgacaaattgctggtgctgagcgccggccagatacagcacttcggccccagcgacgccatcctgaaaaaactgcctggttttgcgcccgccgccgcaccggccaatgccgggcgcagcaacggcggcttcaacgtcaattacgccaacttcgccaaaacggccagcggtgaacgaaaagtatgagcaatcagagtgtgatccccggcgatatcgacgccctttcccggcagttcgacgaaggccgttatctgcggctgggaggctggctggtgctgttggggtttggcggtttcctgctgtgggggctgttggcgccgctggacaaaggcgtgccggtttccggcagcgtggtggtggccggcaaccgcaaggcggtgcagcacccgagcggcggcgtggtgtcgcagattcaggtgcatgagggcgaccgggtcagcgccgggcaggtgctgttgttgatggataccgtcgacagccgcacccagcgcgatgcgctgcgcagccagcagttgagcaacgccgcgcagcaggcgcggctgcaagccgagcgcgacggtctgcaagcgatcgctttcccgccatcgctgcaagcgcggcgagaagagccggaggtgatgtcactgatgctgctgcagcaacagctgctcaccagccgccgtgcggcgctgcagagcgagctggcggcgatcgcggaaagcatcgccggatcgcaggcgatgttggaaggggttcggcagtcttacgccagcaagcaacggcaaaaggccatgctgcaggagcaactgggcggcatgcgcaagctggcggcgcaagggtatgtggcgcgcaatcggctgctggatctggaggggcagcatgcgcagatcgacggccaggcatccgaggacagcggcaatatcggccgtctggggcgccagatcctggagctgaaactgcgggcgatccagcggcgggaggagtatcaaaaagaggtcagcagccagctggccgaggtgcggatgaagctggacgagctggataaccgcctggccaaggcggaggccgatctggggcatacgcaggtgaaagcgccggtggcgggcaccgtggtggggttgagcgtgttcaccgaaggcggcgtgatcggcgccggtcagcaactgatggagatcgtgcccagcgatcgcgggctgcaggtggaggcgcgtattccggtcgaactgatcgacaaggtgcaggtgggactgccggtcgaactgttgttctcggcgttcaaccaaagcaccacgccgcgcgtcgagggtgaagtgacgctggtcggggccgatcgcctgaccgacgagaaaagcggcgcgccttattacagcgtgcgcgccaaggtcagcgaagaaggattgcaacgcttgagcgggttggagatccgcccggggatgccggtcgaaggcttcatccgcaccggtgagcgttcgatgatgaactatctgttcaaaccgctgaccgatcgcctccatttggcgctgacggaagagtgagcatgtcggtttcgccgctgcctttcgccgcgcccggcaccgccatgccctggcgccgttgtctggtgttggtgctggcgctgcatctgctggttgccgcgctgttttggtcctggagatacaaggccgagccgccgtgggtgccgccgccggcggtgatggtgctgatggccgccgcgccgcaggccccggccgaggcgaaacaaccgccgggacaaaggacgccgccgcctcaggttgaaccgccggcgccgccggagccgttgccgctagtgaaagcgcctgacgccgcgcagccgaacatcgccgtgccgctgaaacagaaaaaaccacctaagccggtgaagaaaaacaacctgccccgcacgccgccgcacgagagaatcatcgcgccgccgaaggttcaggaacaaagcgtcggcgcgccgccgccgggccgcgcggataaaacggccgcgccgcaaacccgcctgacgccctatgctcaggcgggggaggacaactggcgcagccgcatcagcggccgcctgaatcgctttaagcgttaccccaaagacgcactgcggctgaagcgccagggcgtcgggcaggtgcgtttcacgttggacagacagggccacgtgctggcggtgacgctggtcagcagcgccgggctaccgtcgctggatcgtgaaatccaggcgctggtcaaacgcgcttcgccgctgcccacgccgccgtcggacgcctacgtcaacgacacggtggaattgacgctgccgatcgatttcagtttgcgcggcgcgggtttttgagtcgcgacgagatatcccccgaacaaaaccatttttcagcagcttgtcctgctattcattattttcaaagcgtatcgttattttaatcaacgtgacgaagttggcgttctgcgcgatattttaatttaaaaagcacgaatgccttttatttttctgctgataaaaaataaacagcttgacgctgtggagttcgggttttagtttttaattataaaacaggaactgagttccatatagtggaacaaggcggatcatgacaacgctggaaaatgccgctgcggtattaaaactcttttctcaacaacgcgtgatgcatggccagccgggtatagcattcagcgacgtggtggatcaattggcgctgccgaaaagcacggtgtcgcgcctgctgcagaccatggaaaatcagggcatgctggagcgcgatcccgatagccggcgttaccgcatcggcgcgctgttgctggcggtatccagccactatctgtcgatgccgctggtggacagcctggcggccagtatggcgcagctgtgccgccagacggcgtgtaccggctacctttcggtattggaggggcaggagatcatggtgatgcgcatgtttcccggccgccactttttgcaggtggtcactccggcgggttaccgttcaccggcggcggaaacctcggtcggccgggcgatactggcgcgtgaaagcgacgagcaggttcgagcgcgttatgccggcggttaccgagcggcttcgcccaatgcgccgcaaacgctggatgcgctgttgcagaagttgcagcaggtgaggcaccagggatggtcgttggcacgcaatgaaactttgaacagcatcagttcgctggcgaccgcgctggtgaacaagcacggcagcgagacggtggggctgtgtctgtccttcccttcgcagggtgaggaacagccgttcgtaccggaagttctggccgaattaaccgcagtcacctgccaactggcggaaaaatatggcgatgattattggcagcagatcaaataacgcgtcagagctgtagcattccatcataattaacgagtgccgacaccagggaactcattagttatattccaccgtattttattggtgggagtagataggctgagtaagagaataataatgttatgacgccagcagttccaaataatggaactgctgcggcgagctatcgcctggcgttatttccgtcatgcggcagggaatattcagggaaaccaagcatgaaatcaaataatccgctaaaagcggccggcacgctgttggtcatggcgctactttcggtgatgggggcgatcatcggcgttcaactgatcaccacgctgggcgtgacgcccaacacttcgatcatcggcgcgctgatcgccatgctgttggcgcgcatcccgctacagatgttccaacgctatcgttcggtgcatacccagaacctggcgcaaacggtgatctcctccgccactttcggtgcagccaactgtctgctgatgccgattgcggtgccttacgtgatggggcaaccgcagcttattttaccgatgttctgcggcgtggcggcggcgatgctgctcgacgcctatctgctttatcgtctgttcgataccaaagtgttccccgccgccaatgcctggccgccgggcgtcgccgccgcagaggcgattaaagccggcgatcgcggcggcaagcaggcctggctcctggtggtgggcgtagtggtgggcatcgctggatcaatgctcaagatccccatggcggctttcggcaccgcctttatcggcaatatctgggcgctgagcatgttcggcgtcgggctattgctgcgggcctacgccgagccggtggccggattcgatattaacgcccattttattccgcacggcgtgatggttggcgctggcctggtggcgctgatccaggtcgcgcaggtgatccgcagccgccgcgctgatagcgccggttatacccaacccgacagcgccgtaagcaaagcgctcggtctgggcgcggtcggctatatcgtcatcgccgcttttttggccctgatcggcgggctgtttagcgagatgtcgctgccgatgttggcgctgttcgtgatttacgcggcgtttgccgctttcgttcatgagttgatcgtcggtatcgctgccatgcactccggctggtttcccgcgttcgcggtggcgttgatcaccctgatagtcggtatcctgatcggtttcccaccgctggcgctatgcatcctgaccggttttaccgccgccaccgggccggccttcgccgacatgggcttcgatttgaaagccggcttcatcctgcgcggctacggtgaggatctgcagcaagagctgctggggcgtcgcattcagctgtttgcggcgttgatcgctttcatcatcgccattccggtggtttacctctcttaccacagctatttcctgcaggatctgatcccgccggtcgcgcgcgtttacgccaaaaccatcgaggccggcgcgcagccgggcatcgcctggagtctgttgatctgggcgatccccggcgccgtggtgcagctggtcggcggccctaaacgccagctcggcgtgctgctggcaaccggcctgctgatcaacaacgccttggccgggtgggcggtgctggtcggcatcgcgctgcgcgtggcgatcctgcgacgttggggggatcgtggccgcacgccgatggagattatggcggccggatttatcgccggcgatgcgctctacaacttcttcagctcgattttttccagcaagggcaaatagctcctgccgatgacattggtgaggtaaaacgaccatgagtttgcaacaaacgctgcaggtttttgaattgattgatagcgcattcgtcagcggccaagacgtcgtcgacctgtttgcgtcttacccggcgatccgggccagcaccttgcgcgccgaggggccgaagggcggcaccgatttcgtgcgtatcgagatccccggcagtgcaggaaaattcggcggtggtgcggcgccgacgctgggcattatcggccgcctgggcggcattggcgcgcggccgacgcgaatcgggctggtgtccgacggcgacggcgcgatcgccgccattgccgccgcgctgaagttggcggagatgcagcgcaagggcgacatgctgccgggcgatgtgatcgtcaccacccatatttgcccgaacgcgccgacccggccgcacgatccggttgattttatggattcaccgatcgatgacgtgacgatgaacgataacgaagtggtgccggaggctgacgccatcctgtcgatcgacaccaccaaaggcaaccgcatcatcaatcataaaggctatgcgctgtcgccgacggtgaaagaggggtacatcctgcgggtggcggaagatctgctgcgcatcatggagatgaccagcggccggccggcggtgactttcccgatcaccacgcaggacatcaccccttacggcaacggtgtacatcacctcaacagcatcttgcagccctcgaccgctactgcagcgccggtggtcggcgtggcgatctgcagcgaatcagtggtgccgggctgcggtaccggagccagccacgaaacggacatcgcgttggcggtcaaattcgcggtggaagtcgccaaagaattcggccgcggtacctgccggttctatgatgccgccgaatacgaccggctgctggcgctgtacggcagtctgagccacctgcaaaaaaggagatagacccatgacggcttcattcgccacgctgaccatcggtcaggcgccgcgcagcgatatcatgccgctgctgtctgcttatctgccggcggagcgagtgaggcacgtcggtttgctggacggcctggatatcgggcagatcgccgagcgttatgcaccgcaacagggcgacaagctgctggtgtcgcgtcttttggacggtacgcaggtgacgctcggcgccgctcgcgtcgaaagcgggttgcaggagaagatccgcgaactggaagcgacgggatgcgaggtgattctgttgctatgcaccggcgaattcggtcgattgcaggcggaacgggtgctgttgctggaaccggatcgcattatcccgccgttgatctctgcgatcgtcggcacacaccgtgtcggcatcgtggtgccggtggctgaacaggttgggcagcaggcgcgcaaatggcggcagctggcggcgccgccgagctatgccgtcgccagcccctatctggcggatgacgctgcgctggagcaggcggcttgcaccctgctgcggcagggggcggaggtggtggtgctcgattgtatcggttatcaccagcgtcaccgcgcttttctgcaggcgcgtctgtcggtaccggtgctgctgtcgaacgtactggtcgccaagctggccgcagagttaatcgactgattcaaatagccataaatctgcgctcgacgcgactacgggcgttttgcgcccgtgaggcgccccgggcttcagcagccctgactgtcggcgagagggcctgtagcgttttactctgcgccgcgatcgcatttcgcgcgaaaaaccagtgacagatcaaccgcaatcccccaatatggattttccatcaagatgattacgcgggtgccagtctatgctgaaagtgaatgagtattttgccggaaaagtgaagtctatcggttttgacagtagcagcatcggtcttaccagcgtgggtgtgatggaagagggcgaatacaccttctccaccgcgcagccggaagaaatgacggtgatcaccggggcgctgaaagtgctgctgccgggagcgccggactggcaagtgtttacgccgggcgagaagttcttcgtgccggggcacagcgagttcaacctgcaggtggccgacgccaccgcctatctgtgccgctacctgagcaaataaacgttgctcgttaggggaacgcagggctcagcgaaggctgggccctggtcgtttctgcggcgggattaacgctgggcttcgccgccgagcgcttcgatggtgtttttgatcaacgccgccagctcgctggtcatcaggataaagtcggcgtcaaagcgctgggcgaagtcgtcgcgatcgatgtcgtcgttctgttcgcgcagcgtgtcggcgaacttcaggcgcttgaacgaaccgtcgtccgacagcatcagctggatgcgctcctgccaatccaccgccagcttggtcaccagcttgccggcttcgatgtgcaccgcgatttcgtcgctgatcagattctgtttcttgcagcggatcacgccgccttcttccagaatcgctttcaattccgcttcatcctgaatggcgaagccggccggcatctcgccggaacgcacccattcggtcagcgtcagttcgatcgggctttccatggtcagcggcaccaccggcagcgagccgaggcttttacgcagcagcgccagcgtgtcttcggcgcgtttagcgctggcggcgtcgaccatgatcagatcgttgacggtgtctatccacatgaaggtctggttgaagcggctgaacgcgcgcggcagcaggctgtgcagcacttcatccttcagcgcgtctttctcggttttcttcagtttgcggtgttgctccgcctccaggcgctcaatcttggcctgcagctcttgcttgatcaccggcgacggcaggattttctcttccttgcgcgcgcagatgacgatctggccgttgaccgcgtgcgtcagcgcatcgctgtgcgagcccatcggggaaacccagccggtcttcgccatgtcctggctgccgcacggcgtgaaggcgaacgcgctgagttgtttttccatttcatccgcgtttaacgccacttcgcggctcaaacggtaaaccatcaaattcttaaaccacagcataatgttatccctggctgggcgtgcgttcggcacgctgattcgtcaaaagcagggcggcatgataacgaattgacgctgaaaaatcgccccattctctccgaattgcgtcgctttgcgcatcgggaaaggacgggacggagaatgggaaacaggtgattcattcgcgcgcttacattaggctgtgacaacgctgcgcggcatcgaggagaaaaaatacgtgcgcattggcatcgacttgggtggaacgaaaattgaagtgatcgcgttggcgaatgacgggcgggagctgtttcgccatcgcatcgccacgccgcgccatgactaccggcaaaccctggcggcgatcgccgggctggtgaaactggcggaggatcataccggcgaacgaggatcggtcgggatcggcattcccggcacgctgtcgccgtttaccgggcgagtaaagaacgccaactcggtgtggctcaacggccagcctctggataaggatctgtcggcgctgctggcgcgcgaggtgcgcatcgccaacgacgccaactgcctggcggtgtcggaagccaccgatggcgccggcgccggcgcgaaaaccgtgtttgcggtcatcatcggcaccggctgcggcgccggcgtggcgctgaacggccaggcgcatgccggcggcaacggcatcgccggcgaatggggccacaatccgctgccgtggcaggatgacgatgagctgcgctacgcccgcgaagtgccgtgctactgcggcaagccgggttgcatcgaaacctttgtttccggcaccggtttcgccaccgactatgcgcgcctgagcggcaatgcgctgcaagggcatgagatcatggcgttgagcgagcggggcgatgcgttggcggagcaggcgattgaccgctacgaaatgcgattggcgaaatcgctggcgcacgtgatcaacatgctggatccggacgtggtagtgctcggcggcggcatgagcaacgtggatcgtctgtatcgcacggtgccgcaactggtgaaaggctgggtgttcggcggcgagtgtgaaacgccgatccgcaaggccgttcacggtgactccagcggcgtgcgcggtgcggcctggctgtggccgcaacagcagcgctaagcgttgcaacaaagcgcgaggctgctcgcgctttaaacccttcactgtacaaaaactggacggcgctttatgatttagctaacttagctaaggaggacgcgtatgccgattcaggccaatatgcacgaagccaaatccaatctgagccaactggcggacagagccgcggagggagaaaccgtgattattgcaaaagcagggaagccgtacgtacagctggtcgccatcaagggggaagcgcgccgccctggcgccgccaagggcaggttcaccgtgccggcggatttcaacgccggggatgcggccattgcggcgctgtttgagggcgatgaatgaagcgcctgctgctggatacccacgcgttgctgtggtggctgatcgatgacgcctgcctgggcgccaacgccaaaaggcagatcgccgatccgggcaatgcggtgtacgtcagcgcggccagcatttgggagatctcgatcaagcaggcgctgggcaagctggcgctgccggaagacatctttgcgatcatcgaggccgaagattttctgtcgctgccgatggacgcctttcattgccaacaggccgggcagctgccgccacaccatcaggatcctttcgatcgcatgctgatcgcgcaggcgcaggccgaagggctgacgctgatttccgccgacgcggtgtttccgcagtacggcgtgcgggtggcggacgcccgccgttaaaccggcttttcctcgctttcgctgcgcacccgttcgatatgaatggtcaggaacatcatctcttccgtggtgagctggtgctgatagtgcttttcgatgtggcggttgatcttacctgcgcaggcgaatgactcgcggtacttctctttcaccacctgatacagcgagtcgtcgtcgctgtcgacgtagtttttccccagcagccgttgggcgaagaatttcaagtgggtgacgaaccggtggtagctcagggattcctcgttgtaatcaaagcggaaatggtatttgaccaggttgaggatctcttgcatcacgcgggtaatgtgcagcgtgttgtgcatctcgtcgttaagctgggcgttgaccaggtgcagggcgataaatccggcttcgtcctccggcaacgcggtatccagccgctgtgcgatcagggccagcgcctccagcccgacggcgaattcggccgggtagagttttttaatctcccatagcaacgcatttttgatatccagcccttgcgcatggcgctgcagggcaaagtggatgtgatcggtcagcgtgatgtagacgatgttatgcagcttgcccggcaggcgttcgcgggcgagagtaataatcctgtcggcagtggtgacgcaggccaatgggatctcggcgagcagctctttatagcgctcggcgatttcaccgccgttatgggtgaacaccttttcgatcaggctttcgtccagcgtatcgccgggcttctttttaaagccgattccttttcccatcaccaccgtctctgcctgacggtcgtccagcgtaatcaccacgttattattgagtatcttagcgattttcatggtttttcccggtgtttcagcatcctgaaaacgaaaaaacctgacgcccggaagcgatcccgggcgtcaggttttgcctgtattttatgtttctgtcctgcggcctgagcggcggaggggatacagtaacaatcctgttatgctggcataataacccgtgcccgccgcggctcaacgcttttcaccgcggagtgccgccgcggtcacacttctgcgccgcaagccgcgggatcattccagcctgaagtgcgcctccagccggctgacgccgagcccgttgacctttttcactttgatctgcaccggaatgcgttctttcatcgcctcgacgtggctgatcacgccgatggttttgccggaggcgttcaggctgtccagcgcatccagcgcggtatcgagggtttcggcgtccagcgtgccgaagccttcgtcgaggaacagcgagtcgatgctggttttatggctgaccagatcggacaacgccagcgccaacgccaggctgaccaggaagctctcgccgccggacagggtgcgggtatcgcgcagcgcgtccgcctgccaggtgtccaccacctgcagctccagcgcgtcgctggtcttgcgctgcagcaggtagcgcccgtgcagccggccgagctgaaggttggccaggtaaaccagatgatcgagcgtcagcccctgagcgaagcggcggaacttgtcgccttctttcgagccgatcagttggttgaggtagctccagtcatcgtagtcttgctggctgcgggcgatctgctcgaacagcgcctgctgattgagacggcgttcggcgtcgcttgccagctgattgcgcagttcgccctgacgcagctgcaacgttttcaactgctgcgccagctcggccagcgattgggtgagcgcatcgagatccgcgttggcttcatccagcccttcagggcggttctgccggtgctgctccagcgtttgcgtcgcctgtgtcagcagggcggtggcctctacctgccgctgttgcaactgctctttgcgctgctgcaattcgcggcgcaggacatcgtccagcagcgcggcggcgaaggcggtttcatcggcgaattcgctgtcggccagcgcctgctgccactgctgctgcgcctgctgcagccgctcctgcatctgggtgtgttgttgttgcagcccggactgctggccggccaggcgctcgcgcagttcctgcgccttttgccactgctcggcggcctgcaaactggcctgttcacaggcggtttgtttggcgcgcagctgttcgcgcacctcggcgacctgctgttcgccgaacagcgtcagccgctgcgcgcgtcgttcggcaagggtcttctcgccttcttgccagcgttgttgcagctcttgctgctgttgcaggctgtcggcgtgggctttctgcagcagcgtaaagcgttcttcgagcaacgccagctgttgctgcgtctgctgctgctgcgtttgcagatcgatgagcgcatccttcgcctgctgtaccgcctgcgccgcctgttcatgctgctgcagcgcctgttgcccgcgccgttcttcgtcgtcgcagccgttcagccaggcgctgagttgctcgccatccgccagcgtaaagtcgaacgccagcggcgcgctgagctgccgccactgctgctgttggccggccagctgttgttcatcctgcgcgatggtttgctgctgacgctgcaattgctgttgcaggttgtcgtaacgggctcgcagctcgacgccttgtttttgcaatgcttcggtctggactttcatttgctccagacgttgcgcggtttctgacagttttacctcttggtattgttctaccgccgggtgctcgcatgagccgcacagcgggcagggggcgccgggttgcaaacgggcgcgctcggcctccagacccacgatccgttgttccagcgcataggttttttcaacatcggcctggtgggctttctgctgcttaaatcgctgacggatgagttctagctgtggttccaactgggtaagttcatgttgaccgctgtttagctcttgccgctgttgttccagccgtttaacgatttgctgcgataaagaagcgagagtaaacagctgctggcgcgtcgggcgcagatccgccaggacgctcaggcgctggcgcagcggggccagcggcgtttgcgcctccagcgcctgctgctgttgctgttgaacgaccagcgcttcggtcagcgtgttcaactgctgctgaaactgtgcggcctgcctcgtcagttggctgcgctgagcggtgagctgctccagcgcggtctgctgctgggcgcactgctgtgcggcggcatcgccggcctgtctacgttcggcctgtgtcgactgcagttgggctatttgatggtcgagcggggcgacctgctcgtcgatcagttgttgctgttgccgcatgtgttcggcatgcgcttgctgcgcctggcgggttttctccaccgcctgctgcagcggggtcaactgcgccgactgctgttcctgctgttgcgtcagctgggctgcctgctgttgtatcgtctgcagctcggcgcggcagcgatcgcgttcaccgcgcagcggccgcaatttctcggccggctcgctgagcgccagccgctgcagctgcggggcggcctcctcctgctcgcgctgggcggtgtccagccgcaattgcccctcgctttgctgttgccggaggcgttgccattgctgcagccagctcagcgcctgttgctggcgctggatttgttcgccgagagcgatttcctgcgcgctcagcgccgccagctgttcggtcagagactggcgctgctcgtcgttcagcagttcgatgccgctggcgcgttggtgcaacgcatccaggtcggttttggcctgcttgtgcgactcgaacacctgttcggacaaccgcccgtagatttcggtgccggtcagctcttccagcagctcggcgcgatcgttggcgtcggcgttgaggaaggcggcgaactgcccctgagacagcatcatcgatttggtgaagcggccaaagtccagcccggtgatggcggcggtaagctccagcttgtcgcgcaccttgtccgccaggatcttgccgtcttcgcggcgtgccagttcgaccttcggcgcctgcagattgccgtccggcgcgtttttggcgcggcgctggctccagaaggcgcgatagccgatgcccttgacctcgaactcgacctccgccagcgattcggcggtgtggcgggtcatcagttcattctggcttggcgtgacgttgagacgcggcgtctggtggtacagcgccaggcaaatggcgtccagcagggtggttttgcccgcgccggtcgggccggtaatggcgaacagaccgttgctggcgaacggctcggcggtgaagtcaattttccattcgccctgcagcgagttgaggttttttaaccgcaggctgaggattttcatgggttgctctcttcagggttgtgctgcaccgcctcgaccacctggcggaacagttggtgcatccgccgttggcgcgcttcgggcatgtcggcctcctgcgccaggcgccgttcgaacacctcgttgacgctcagctcgttgagcgtttccttatcctgctgcgcgatcgcctggcggcgctgctctttactgcgccgcagcagcaccacttccaccggcagcgcatccgccatcagctggatgcggcgttggatatcgctgaggtagtcctgcgtcgccacttcgatatccagccacaccggcagctcgccggcataatcggcaaattgccgcagctgccgttcgatctcggccagatcgcctttgagcagttgcatgggctgaaactgcgggatcgttaacgtttctacccgctgcaaagcgccgtcggcgaaatccaccaggaagacgcttttggctttgcccagctcatcgaagctcagcgggatcggcgagccgctatagcgaatatgctccgatttggcgacgttctgcgcgcggtgaatgtggcccagcgcgatatagtcggcgggggggaaggcctgcgccgggaaggcgtcgagggtgccgatatagatgtcgcgcaccgagtcggaggtggtaacgccgacggtggtcaggtggccggtggcgacgatcggcagtggcaggcccaactggtcgcggcgctcgcaggccgcctgatacagcgtttggtaatgttcggcgatggcttcctgcaacgcctgctgtttctgcgcgccggattcgccggcgcggctggtgagcagatcgcgcggccgcaggaacggaatggcgcacagcaccgcgcccggctggccgtcgcgccggttcagcaccacgatttgctgttccggggcgccctgcgcgctggcgatcaccgtggtgttcaggcaggagagcagctcacgcgattcgttcagcgtcgccaccgagtcgtggttgccgcccagcaccaccaactggcagccggtgcgctgcagttccaccacgaagcggttgtacagctcgcgggcatagctgggcggcgagccggtatcgaacaaatctccggcgacgatcagcgcatccacctgctgctgatctacctgttcgatcagccagttcagaaaagcctggtgctcggcggcgcggcttttggtgaaaaagtactggccaaggtgccagtcagaggtgtggatcaggcgcatgacactcccggatgtaaagataatggcgatgattataaaggccgcggcggcggctgtcccggcgcaatgatgatgacaaccggatgatttttcgttactgcgggaaataatcgctatgcttactgcctataacagccggtttttttcataaaagtgtcacaaaactgacgcataatggcgcccgaaaagtcgctaacacattggcaggattgacgatggcaagacgcatactggtggtggaagacgaagcgccgatccgtgagatggtgtgctttgtgttggaacagaatggttaccaaccgttggaagccgaagattatgacagcgccgtgacgcgtctgtctgagccgttccctgatttggtgttgcttgactggatgttgcccggtggttccggcattcagtttatcaaacatatgaagcgcgaagcgctgacccgcgatatcccggtgatgatgctgaccgcgcgcggcgaagaagaagaccgggtgcgcggcctggaagtgggggcggatgattacatcaccaagccgttctcgcccaaggagctggtggcgcgcatcaaagcggtcatgcgccgcatttcgccgatggcggtggaagaagtgattgaaatgcaagggttgagcctggatccgtcctcccaccgcgtaatggcgaacgatcaggcgctggacatggggccgaccgagttcaagctactgcacttctttatgacccacccggagcgggtttatagccgcgagcagttgcttaatcacgtctggggcactaacgtttatgtggaagaccgtaccgttgacgtgcatatccgtcggctccgcaaggcgttagaaaccagtgggcatgataaaatggttcaaaccgttcggggcaccggctaccggttctcaacgcgctactgatcgcgccgcgctggagaatatgccgtgttagaacgtctgtcgtggaagaggctggctttggagctggctcttttctgtctgcccgccttactgctggggctgattttcggttatctgccctggttcctgctggcctctgcgctggctgcgctggtgtggaatttctacaaccagctcaaactctcccattggctgtggatcgaccgcagcatgacgccgccgcccggccgctggagctgggagccgctgttctatggcctgtatcagatgcagcagcgcaaccgccgccgccggcgcgagctggcgctgctgatcaagcgctttcgcagcggggccgaatcgctgcctgacgcggtggtgatgaccaccgtcgaaggcaatatcttctggtgcaacgggctggcgcagcatctgctcggctttcgctggccggaagacaacggccagcacatccttaacctgctgcgttatccggaattcagccactatctgcaacagcaggagttttcgcgcccgctgacgctgcagctgaacaacgaacactacgtcgaattccgcgtgatgccctattccgaagggcaattgctgatggtggcgcgcgacgtcacccagatgcgtcagttggagggcgcgcggcgcaacttcttcgccaacgtcagccatgagctgcgtacgccgctgacggtgctgcagggctatctggagatgatgggcgacgaagagcaggacggttcgctgcgcagcaaggcgctgagcaccatgcaagagcagacccgccggatggacgggctggtcaagcagttgctgacgctgtcgcgcatcgaggcggcgcccaatgtcgacatgaacgagcgggtggatattccgctgatgctgcgggtgttgcagcgtgaggcgcaatcgctgagcggcggcaatcacgagatcaccttccgggtgaacgaacagctcaacgtgttcggcaatgaagaccagttgcgcagcgcggtgtctaacctggtgtacaatgcggtcaaccacacgccgaagggcacccatatcgaagtcagctggcagcagacggcgcatggcgcgcagttccaggtcagcgacaacgggcctggcatcgccgccgagcacctgccgcgcctgaccgagcgtttctaccgcgtcgacaaggcccgctcgcgccagaccggcggcagcgggctggggctggcgatcgtcaagcacgcgctcagccatcacgacgcgcggctggagatcctcagcgaaccggggatcggcacccgctttatctttaccttgcccaatcggttgattgttcccgccgctttatcagagaatgcggtgaaaaattaacgcgagacaccggtatgacccgaatcacccgagggctgttgctttgcctggcgctgctggccggacgcggcgcgctggcgcagcctgacggcatgttggcgggcaacctgtccagcgtcggctccgacacgctggcgaatctgatggcgctgtgggcgcaggatttcagccagcattatcccaacgtcaacctgcagatccaggccgccggttcgtcgaccgcgccgaccgcgttggcggcgggcgccgcgcagctgggcccgatgagccggccgatgaaggcggccgaggtttcggcgttcgaacaccgttacggctatgcgccgctggcggtgccggtagcggtggatgcgctggtggtgttggtgcatcaggacaatccgctgcgcggcctcaacctgcagcagctcgaccgcattttctccgccacccggcgctgcggcgaaagccagccgctgacgcgctggggcgagctggggctgcgcggcgactgggcgacgcgctcgctgcaacgcttcggccgcaactcggcgtccggcacctacggctatttcaaactgcgcgcgctgtgcggcggcgatttcatgccgcgcgtcaatgagctgcccggttcggcctcggtagtgcaggcggtggccggttcgctcaacggcatcggctacgccagcatcggttttcgcgccagcggcgtgcggctgctgccgctggcggagtcgggagaagactatgtcgcgcctaccgccgccaacgtgcgcaacgatcgctacccgctgtcgcgctatctgtatatctacatcaataaagccccccatcaaccgctggagccgctgaccgccgcgtttctcgatcgcgtgctgtcgacaccagggcaaagcctggtcaatcacgacggctatctgccactgccgccggccgcgctgcagaagacccgccaggcgctcgggttgccaccgctcgcgccggccacggtgcaataagcgacaaaaagcggcgtaattttcgccttttttcacggcgaaacggagcttataccacgcgaaaatcgagcatttattggcgttttcgcgcggtaaagtgatatatgcttcacgtttcgtgaattcattgttcaaaaatgatacaaatcatgtagtgtatatttattgatagccaatatgatcgactggtggctaaagtttatatggtcgatagctctgcttttcgccgtgcgtcttgccttgaagcgctataaacgtttaccttagccttcgttgtcggattaaacctccatttttataactcctaaaattttgcccatcttcatgagcggccactttcgaatagggacataaacgccggatcgactgcgtttagggtgcttatttggcgcggcgacgatcgggcatgccggcaaccgggtggggcgtttcgccaccacgctatcggacaatttttttcatttgaacaggcaacacgacatcgtatgagtcatcgtttaacgtcaaaagatatcctggcactgggctttatgacctttgccttattcgttggggccgggaacatcatcttcccgccgatggtcggcttgcagtccggtgaacatgtctggactgcggcgctgggcttcctgatcaccgccgtgggcctgccggtcatcaccgtcatcgcgctggcgcgcgtcggcggcggcatcgacgccctcagttcgccgatcggccgcggcgccggcctgctgctggcgaccgtctgctacctggccgtcggcccgctgttcgccacgccgcgtaccgccaccgtgtcctttgaggtgggcatcgccccgctgaccggcgacggcgccatgccgctgttcatctacagcctggtgtatttcgcgctggtgatcggcatctctctgtatccgggccgcctgctcgataccgttggccatgtgttggcgccgctgaagatcgtcgcgctggccgtactgggcatcgccgcactgctgtggcctgccggcgcgccgattccggcgacgacggcttatcagagcgtgcctttctcctccggcttcgttaacggctatctgaccatggatacgctgggcgcgctggtgttcggcatcgttatcgtcaacgcggcgcgctcgcgcggcgtgaaagacgccggcctgttgacccgttacaccattctggccggtttgatcgccggcgtgggcctgacgctggtgtacctgagcttgttcaagctgggttccggcagcggcgcgctggtgcctgacgccaccaacggcgcggtgatcctacacgcttacgttcagaacaccttcggcggcctgggcagcttcttcctggcggcgctgatcttcatcgcctgcatggtgaccgcggtaggcctgacctgcgcctgcgccgagttcttcgcgcaatacctgccgttctcttacaagacgctggtgtttatcctgggactgttctcgatggtggtgtccaacctcggcctgagccacctgatccagatctccattccggtgctgaccgcgatttacccgccgtgcatcgtgctggtggtgctgagcttcaccctgcgttggtggcacagcgcgccgcgtatcatcgcgccggtgatgcttgtcagcctgttgtttggtatccttgacgcggtgaaagcgtccagcttccagcagctgctgccggcctggaccactcacctgccgctggcggagcaggggttggcatggttgccgccttcgctgctgatgctggtgctggtcgcgatttatgatcgggtgtgcacgcgttcccaagtgaccgcgcactgataatcccccggcttaatccagggccacggacatgtccgtggcttttttacgtttaaaactatgggtcatcttcatgcaacaacagtcacccaccaccgcctccgacaataagctgaaacgcggcctcagtacgcgccatattcgctttatggcgctgggatcggccatcggcaccgggttgttctacggctcggcggacgccatcaaaatggccggcccgagcgtgctgctggcttacctgatcggcggcatcgtggccttcatcatcatgcgcgcactgggagagatgtcggtcaataacccgcaggccagctcattttcccgctacgcgcaggactacctcggcccgatggcgggttacatcaccggctggacttactgctttgaaatcctgattgtcgccatcgccgacgtgaccgccttcggcatctatatgggcgtctggttcccggaagtgccgcactggatctgggtgctgagcgtggtgctgatcatcggcgccatcaacctgatgagcgtcaaggtgttcggcgagctggagttctggttctcgttcttcaaggtcgccaccatcatcatcatgatcgcggccggcatcggcatcatcatctggggtatcggcaacggcgggcaaccgaccggcattcataacctgtggtcgaacggcggcttcttcagcaacggcgttatcggcatgatcctgtcgctgcagctggtgatgttcgcttacggcggcattgaaatcatcggcatcaccgccggcgaagccaaagatccgaaaaaatcgattcccaaagccatcaactcggtgccgtggcgcattctggtgttctacgtcggtacgctgtttgtcatcatgtcgatctacccgtggaaccaggtgggcaccaacggcagcccgttcgtgctgaccttccagcatatgggcatcaccgtggcggcaggcatcctcaacttcgtggtgatcaccgcttcgctgtcggcgatcaacagcgacgtgttcggcgtcggtcgcatgctgcacggcatggccgaacaggggcacgcgccgaagatgttcagcaaggtgtcgaaacgcggcattccctgggtgacggtagtggtgatgatgctggcgctgttgctggcggtgtacctcaactacatcatgccagagagcgtgttcctggtgatcgcctccctggcgaccttcgccaccgtgtgggtgtggatcatgatcctgttctcccaaatcgccttccgccgcagcctgagcaaagagcaggtgaagcagctggcgttcccgctgcgcggcggggtgttcacctcggtggtggcgatcgtgttcctggtattcatcatcggcctgatcggctatttcccgaccacgcgcgtctcgctgtacgccggcctggtctgggtggtgttgctgctggcggggtactggttcaaggtcaaccgccagaaaaaacgcgcgctgctggcgacgcagcaagactaaatggaaaaacaccggctgaggccggtgtttttttagggtttatcttccacttcctcatccccggcggcgcgcgcttcgatgcgcataccgccgtcgttcaggcgttcctcctcttcctcgccggcgcagcgtgccagcacttcgcgaatgtcctgcagattgctgctaagggcgctcagcgaaggttgcagattgcggggcatgcggctttcatccagcgatgcgctgtgcaggcagccgataaacagcagcgtggccatcagggtgaacagccgatgacgtaaccgtttcagcaagagctttccctctcggtggtgaaggtgatggcgcattaacgccgttttcaccggggaaaagaaggggatggagatatctgctggcaattgaaagcgaataattaccagcagacacagttacgtcagccgacgtcaggaagcgttcgcgctttgtcgcagcatgccgcgcaggtcgttgccggtcggcgtctgatgcacgcgcaggccgaactcgtcgatcaccgccaggatatggtcgaaaatatccgcctgaatgctttcatactccgcccagaccgtggtgttggtgaaggcgtagatttccagcggcaggccctccggcgtcggcgccagctggcgcaccatcagcgtcatgttcaggtgaatacgcggatgagcgcgcaggtaggcttccagataggcgcgcagtgtgccgaggttggtgagacggcggccgttgagcggcgaggccagatcgacggcgatctcctggttgtgctggctcagctcctgggttttgttattcagatagctgtgcagcagcgggttgcgctgcaggcggcgctgttcctcttccgacaggaagtgcacgctgccggtgtcgatattcaggctgcgcttgatgcggcgcccgccggattccgacatcgaacgccagttcttgaatgagtcggagatcagcgcgtaggtggggatggtggtgacggtgttgtcccagttgcgcactttgaccgtggtcaggccgatgtcggtgaccgcgccgtcggcgccgtatttcggcatttccagccagtcgccgatcttgagcatatcgttggcggagagctgaatgccggccaccagcccgaggatcggatccttgaacaccaacatcaagaccgcggtcatggcgcccaggccgctgagcagcagcagcggcgatttgcccatcagcaatgagacgatcatgatgccgatcaggatcgccgccaccagtttcaggccctggaaaatgccgcgcagcggcagctgattggaaatcgggctttggcgcagcagcgccagcagcgtatccagcagcgagaacagcgacagcagggtgaaggcgaggatccacacctgcgcggcggtgacgatcaccgcttgggtctggctgccgctctgcagccacagcgtcgcctggatgctgatgatcaccccttgcagcagcagcgccacgcgctggaacagtttgtattgggtgatggcctgttgccagacgcgctgcgactgctggccacggcgctgaagagcagccaacaccacccggtgcagcaccaggtggatcgctaccgagatcagaacaatcaaccccaataccatcaacagcgacatcactccgccgaattccaaaccaaactgttccagccagcgcgttatctgttgttgcattaccgctccttaaaaaatgcgcaaaaaatatcctgtaaacttaaaacgcgttagcctaaggggtaacgtgcaggatttgtacctgtttacctttttttacatcaagttagcgttatttttcggtctccgccccccggctcatccccgggttttgcggccagagaggagggggagttgcacttaacgtggcattgttcgtttcttgaagaacgccgtcgatttcgtttggtacagcaggagaacagtatgcttaacgcctggcatcaaccggtcccgccttttgtggtgaaacaagggcaacgtttggatatcacgctgtggttacaaggggatgaactgcctgaacgggtatttttgcgcgccgaaccggacaatgaagagtggctgctggtgatgaaagcgcagcgccacgaggggatgcggcgctaccaggccagcctgacgctgaatgagggcgagccgacgcggcgatactgcttcaagctgctgtgggccgatcgccaacagtggttcggcccgcagggctggtcgtcaacgccgccgggccagctggcgcagttcgccgtcgacgatcctgacaatggccccgagtgggtggcggatcagctgttctaccagattttccccgatcgcttcgccagcagcggcggcgagcacggcatccagagcggcagctatcgccatcatgcggccggcgccgaggtaattcggcgcgactggcagcacccgttggaggatcgccacgccgcctcgaccttttacggcggcgatctggacggcatcagcggcaaactgccgtacctgcagcagctgggcgtgacggcgttgtacctgaacccgatttttaccgcgccgagcgtgcataagtacgataccgaggattattaccaggtcgatccgcacttcggcggcaacgcggcgctgcagcgtttgcgagtaagcactcacaaggtgggcatgaaactggtgctggacggggtattcaaccacaccggcgattcgcacccgtggtttgaccgccatcgtcagggcgaaaacggcgcctgtcaccaccccgattcgccgtatcgcggctggttcaacttctacccggacggccgcgcgctcgactggaagggcaacgccagcctgccgaagctcaacttcgccgagccgcaggtggcggaagcgatttatcagggcgaaggcagcgtggtgcgtcactggctgcgcccgccgtacagcatcgacggctggcggctggacgtggtgcatatgctgggggagaacggcggcgccaccggcaatctgcgccacctggcgggcatctatcaggcggtgaagcaggagaatccgcaggcctatgtcttgggcgagcacttcggcgacgcgcgccgctggctgcacgccggcgtggaggatgcggcgatgaactacatgggattcgcgctgccggtgcgggcgtttttagcggggctggacgtggcctaccacccggtgcggctggacgccgccgggtgcgcgcagtggatggacggctaccgcgccgggctgccgcacagccgccagctgatccagttcaatcagctggacagccacgataccgcgcgtttcctcacgctgttgcaggggaacgcggcgcgcatgcagatggcggcggtgtggctgctgagctggatcggtgtgccttgcctctattatggcgatgagattgggttggacggcggcaacgatccgttctgccgcaagccgttcccgtgggacgtcggcgactgggaccggccgctgctggcgctgttccagcgcatggcggcgctgcgtaaacagagcctggccttgcgccgcggcggctgtcaggtgctgtacgccagcggcgaaacgctggtgttcgtgcgtctgtatcagcaggagcaggtgttggtggcgctgcagcgcgacggcagcggccaggcgcagctgccgcataacccgctgttggcgcgtggcccgtggcggcgtgtggaagggcggggagagttgagcgaaacggcgggcgggttgcgcctgcagttggcggaagagtcggccaccgtatggcgctgcgagggctaaagggagtgcgggggcagaaacgcccccgcgattaaggtgagtgggtatttacatcagtaaccgaccgcggagcctgccggacggcgcacgtcgttggcgccgtacaggtagccttcacgcactttaccggaaactgccgaatcgttgccggagttggccgggctgacgcccgccgcgcccggtaaaccgaccagaatcagttcggcggcgccccacggcgtttgctcgaccatcttataacccatgccgctcagcagcttcagcgtatcggcggaaacgccgcgctgttcgtagtacacctcatccggcagccattggtgatggatgcgcggcgcgtccaccgcttcctgtggcgccatgccgtggtcgatcacgttcaacgcggtctgcagggtgatggtgatgatgcgcgaaccaccaggcgagcccagcaccataaagatcttgttgtccttggtcaccagcgtcgggctcattgacgatagtgggcgcttaccgggggcaatgctgttggcggtgccctgcaccagcccgtacaggtttttctcgcccactttgaccgtaaaatcgtccatctcgtcgttgaggaagaagccggtgcccggtgcgatcaccacggcgccgaagcggccgttgacggtataggtggtggagaccgcgttgccgtcgtgatcgacgatcgagtagtgggtggtttccggcttctcatgcggctccatgccgggctgcacgttttccgacggcgtggccttgtccgcgacgattttcttgcggatctgctcggcgtagctcttgctcaccagccggtcgatcgggttcttgatgaattccgggtcgccgaggtaggtgttgcggtccatgtaggcatggcgcatcgcctcggtcatggtatgaatggccgccgccgagttgaagcccatgcttttcaggtcatagccttccaccacgttgaggatttcgcacagcgtcacgccgccggagctgggaggcggcgccgacacgaacttgtagccgcgatagctgcaggtgatcggcggcgtttcggtgaccttgtagttggcgaagtcggccgccgtcaaaatgccgccgccctgtttggccgctgcctccacggcctgcgggatcttgcctttgtagaaggcgtcggttccccctttggcgatggcttccagcgtattggccagatcggtttgcaccagtttgtcccccggctgcagcgggctgccgtccgggcgcaggaagattttggccgactcgggatcctgtttgaaacgtgcaacggtggtgtcgagaatatcggtatcggcgcgggtcagcacaaagccttcgcgcgccagcttgatcgccggcgccagcacctgttcacggctcagtttgccgtacttctcacgcgcggtttccattcccagcacggtgcccggcacgcccgccgccagatagccgtacaggctggcatctttcttcaccttgccgtcggcatccagatacatgttggcgctggccgccgccggcgcggtttcgcggaagttgatgaaggtgtcggtgccgtccgccaggtggacggtcataaatccgccgccgccgatgttgccgcagcaggggttaaccaccgcctgcgcatagccgaccgccacggcggcgtcgatggcgttgccgcccattttcaggatatccacgccgacctgcgaggccagatgctgcgaggtgaccaccatgccgttttgggcttccaccgccgggttggatgccgcatacaggctgccgctgaccagcagcgccgccatggtcaggggtttgctccatttctgtaaaaacatagttattcctaccctgtcagttttttattgtgttgtgtttgcttgccgttgttcgcttgcaaagcgcgagccagcgttattgatagtagccgcagatgggcgtacgcgcggtgaacagggtaggaaatgtgagcggaaacagggaaataaagcactgaaggcgggcatattgccctaaaaaggggcacaaaaaaaccggcccgtgggccggttgattcactatcaggctgaaattacagcttggcagcgttttcagacaggtattttgctacgccgtctggggaagcgcccatacctgctttgcctttttcccactgagccgggcacacttcaccgtgctcttcgtggaattgcagcgcgtcaacggtacggatcatttcgtcgatgttacggccgattggcaggtcgttaaccacctgagcacgcacgatgccgtctttgtcgatcaggaaggagccgcgcagcgcaacgccggcttccgggtgttcgatgccgtaagctttctggatttcacgcttaacgtcagcaaccattgcgtatttcacttcaccgatgccgcctttgtcgacaggggttttacgccatgcgttgtgaacgaattctgagtcgaaggaaacgccaaccacttcaacgccacgcttctggaactcttcatagcggtgatcgaaagcgatcagctcggaagggcatacgaaggtgaagtccattggccagaagaacagcacggctggtttgccgttcaggtgcttcttcaggttgaagttttcaacgatttcgccgctacccagtacggcagctgcagtgaagtcaggggcttgacgagttaccaggaccataattactcctgtaataggtgttaaagggtggatgtaaaaaacaagggccagtataggggccgtgacttggtgaataaagggtaaaagaccaatcgatgagatagctttcacctatcaaagtcgttgatataatttatcgagctttaaaaataaccttttcccacaaaagggcaagcggcaaaacgtaaattcttgcaaggcgctgcaatttcaaacgcttgggcttgacctcagagcgttttttccttcgcctgccgcatcatttgcggataaaactgccagaattgtgtttcaagctgatgataatgttgttcgacgtcggcgaacgagccggccagcgcctcaaggcgcgggcggcggctggccatgccctgcagcacccgggcgatgaacggcaattcggcgtagcgttccagccagcgctccggccacagatagccgttcaggttctgaaaacgcggcggcgtgagcggcaggtaaggttcgatctggctgcgggcttcctgggtgaactggtgcagatcgcgcgagggctccagctgctgccagtggcgcgccagaaaatggtcccacaccacgtcgagggtgatcggcgccacgcggcggtagggggcgctgaaatagtcgcggcaggctttcacctgcggcaggctgtcggtcaacacgtcgacgcggcggtgcatcatgatgccggccaccacatcgggctggtagtcggcggcgggattgccgcgcacgaagtcggccagcaggttgcccagcagcgagctgtccgccagcatggccaggtgaagatgagcgagaaaattcatccctcaactatacctgaagtcaggcaaatcctccttatttcttgccgctgaccgcccccggctttagactaggccgcctgttttttaccaaccagtcctaaattgaagaagtgaatacccatgcgcgtcgctgatttttcgtttgaacttcccgaatccctgattgcccattatccccaggccgagcgcagcgcatgccgcctgctgcagctggacgggccgagcggggcgctgacgcatggcgtattcaccgatctgctggacaagctggaggccggcgatctgctggtgttcaacaatacccgcgtgatcccggcgcgcatgttcggccgcaaggtcagcggcggcaagattgaagtgctggtggagcgtgtgctggacgaccatcgcgtgctggcgcacgtgcgcgcgtcgaaagcgcccaagccgggcgccgagctgctgctgggggatgacgagagcatcgccgccaccatggtggctcgccacgagacgctgttcgagctgcgcttcaacgacgagcgcgacgtgttcactatcctcaacgccgccggccatatgccgctgccgccgtatatcgctcgcccggatgaagacgccgaccgcgagctgtatcagacggtttatagcgagaagccgggcgcggtcgccgcgccgaccgccggcctgcacttcgacgaaccgctgctggcggcgctgcgcgccaagggcgtggaaatggcgttcgtgacgctgcacgtcggcgccggcaccttccagccggtgcgcgtggaaactatcgaagatcacgtgatgcacgccgaatacgccgaagtgccgcaggaggtcgtggatgcggtgctggcctgcaaagcgcgcggcaagcgcgtggtggcggtgggcaccacctcggtgcgttcgctggaaagcgccgcggcggccagcaaagaggcgctgattgcgccgttcttcggcgacaccagcatctttatctatccgggctatcactaccaggtgatcgacgcgctggtgaccaacttccacctgccggaatctaccctgatcatgctggtgtcggccttcgccggctataaaaataccatgaacgcctatcagcaggcggtagccgagcagtatcgctttttcagctacggcgatgcgatgttcatcagccgtaatccgcaggcggaaaacgaatccgtcggcggctaaattcccgggctgcgcgcacggcgcggccccgtttcaacgacatcagactgtttctctgatgctggaggctttgtgaagtacgaactacaaactaccgatggccgcgctcgccgcggccgcctgattttcgaccgcggcgtggtggaaaccccggcctttatgccggtcggtacctacggtacggtcaagggcatgacgccggaagaagtgaaagaaaccggcgcgcagatcctgctgggcaacaccttccacctgtggctgcgcccgggccaggagatcatgaaactgcacggcgatctgcacgacttcatgcagtggccaggtccgatcctcaccgactccggcggtttccaggtgttcagcctgggggcgatgcgcaagatcaaagaggaaggcgtgtacttccgcaacccgatcaacggcgacaaggtgttcctgagcccggaaaaatcgatggagatccagtatgacctgggctccgacatcgtgatgatcttcgacgaatgcacgccatacccggccgactgggactacgccaagcgttcgatggaaatgtcgctgcgctgggcggagcgcagccgcaagcgtttcgacgaactggaaaataaaaatgcgctgttcggcatcattcagggcggcgtttacgaagatttacgtgatgtttccgtcaaagggctggtggatatcggctttgacgggtacgctgtgggcggcttggctgtaggcgagccgaaagaggatatgcatcgcattcttgaacacgtttgcccgcaaattccggaagataagccacgctatttgatgggcgtcggcaagccggaagatttggtggaaggcgtgcgccgcggcatcgacatgttcgattgcgtcatgccgacccgcaacgcccgcaacggccatttgttcgtgactgacggtgtggtaaaaatccgtaatgccaagcacaaggatgatacttctccgctggataaggactgtgattgctacacttgtcgccattacagccgcgcctacttgcaccatctcgaccgttgcaacgaaatattgggtgctcgactgaacacgattcataacctgcgtcactaccagcgcctgatggcgggtttacgccaggctatcgaagagggtaaattagagcagtttgttgcggatttctatggtcggatcggcaagccgattccgcctttaaacgcttgatctaataattgataacttaatgagggaatttcaatgagctttttcatttctgacgccgtcgcatccgcaggggctccggctcagggaagcccgtactctctgatcattatgctggtggtgttcggcctgatcttctacttcatgatcctgcgcccacagcagaaacgcgcgaaagatcacaagaagctgatggactccatcggtaaaggcgacgaagtgctgaccaccggcggcctgatcggtcgcgtgaccaaagtggccgacaccggcatcatcgccatcgcgctgaacgacaccacggaagtgatgatcaagcgtgacttcgtggcggccgttctgccgaaaggtaccatgaaggccctgtaatcttttttcccgaagggaattgccgtgctaaaccgttatcctttgtggaagtatctgatgttgatcgtcgtgatcctcgtcggtctgctttatgcgcttcccaacatctacggtgaggatccggccgtacaaatcactggcgcgcgcggcgtcgccgccagtgaaactacgctggaccaggtccgtaccgtattagaaaaagacaacatcgcgagcaagtcgattgcgctggaaaatggcgccatcctggctcgctttaaagatcctgacgttcagctgcgcgcccgcgaagcgctggtgaccgagctgggtgacaaattcgtcgtggcgctgaacctggcgccggccacgccgacctggctggccatgctgggcgcagagccgatgaaactcggcctggacctgcgcggcggcgtgcacttcctgatggaagtggacatggacaccgcgttgagcaagctgcaggaacagaccatggataccctgcgcagcgagttgcgtgagaagggcattccttacgcgtctatccgcaagctggacaacaacggcgtggaagttcgcttccgcgacgatgcggcccgtgaccaggccatcagctacatcggcccgcgtcagcgcgatctggtgctgtccgccaacggcgccaacaccatgaaagccaacctgacggacgcccgtctgagcgaagcgcgcgaatacgccgtacagcagaacatcactatcctgcgtaaccgcgtcaaccagctcggcgtcgccgaaccgctggtgcagcgccagggcgccgaccgcatcgtggttgagctgccgggcattcaggacaccgcgcgcgccaaagaaattctgggcgccaccgcgaccctggagttccgtctggtgaacaccaatgcggacgccactgcggcggccaacggccgcgtgccgggcgactccgaggtgaaatacacccgagacggccagccgatcgtgctgtacaagcgcgtgatcctgaccggtgaccacatcaccgactccacctcgagcaccgacgaatacaaccagccgcaggttaacatctcgctggacagcgccggcggcacgtcgatgtccaacttcaccaaggataacatcggcaagccgatggcgaccctgttcgtggagtataaggacagcggcaagaaagacgccaacggccgtgcggtgctggtgaaacaggaagaagtgatcaacgtggcgaacattcagtcgcgtctgggcaacagcttccgcatcaccggcatcggcaacccgaacgaagcgcgtcagctttcgctgctgctgcgtgcgggtgcgctgatcgcgccgattcagatcgtcgaagagcgcaccatcggtccaaccctgggtcagcagaacatcacccaaggtctggaagcctgtctgtggggcctggtggcgtccatcgtcttcatggtggtctggtaccgtaagttcggcgtgatcgccaccacggcgctggtcgccaacctggtgctgatcgtcggcgtgatgtccctgttgccgggggcgacgctgaccatgccgggcattgccgggatcgtgttgacgctggcggtggcggtcgacgccaacgtactgattaacgaacgtatcaaggaggagctgaagaacggccggtccgttcagcaggcgatccatgagggctataaaggcgcgttctccagtatcgtcgacgccaacatcaccaccctgatcaccgcggtcatcctgtacgcagtgggcaccggttcgatcaaaggctttgcgatcaccaccgctatcggtgtggcgacgtccatgttcaccgcgattgtcggtacccgtgccatcgtcaacctgctttacggcggcaaacgcattaacaagctgtctatctgaggagtgcgttgtggcacaggattatactgttgagcaactcaactacggccgtaaagtctacgactttatgcgctgggactatttggccttcggcatctcgttgctgctgttggtcgcgtcgattgtcaccatgtcggtgcgcgggtttaactggggtctggatttcaccggcggtacggtgattgaaatcaacctggagaagccggctaacctcgacctgatgcgcgatacgctggagaaggccgggttccaggatccgatcatccagaactttggcagcagccgcgacgtgatggtgcgcatgccaccggcgaccggcaccgcaggccaggaactgggcaacaaggtgatcggcgtgatcaacgactcggtggataaaaacgccaccgtgaagcgtatcgagttcgtcggcccgagcgtgggcagcgaactggcgcaaaccggcggcatggcgctgctggtggcgttgatctgtatcctgatctacgttggtttccgcttcgaatggcgcctggcgctgggggcggttatcgcgctggcgcacgacgtgatcatcacgctgggcgtgctgtcgctgttccacatcgagattgacctgaccatcgtcgcgtccctgatgtcggttatcggttactcgctgaacgacagcatcgtggtctccgaccgtattcgtgagaacttccgcaagatccgccgcggcacgccttacgagatcatgaacgtgtcgttgacccagacgctgagccgtacgctgatgacctccgggaccaccctgatggtggtgctgatgctgtacatcttcggtggcgcgatgctgcaaggcttctcgctggcgatgctgatcggcgtgtcgatcggtaccgtctcctccatctacgtcgcgtccgcgctggcgttgaaactggggatgaaacgcgagcacatgctgcagcaaaaagtggaaaaagagggcgcggatcagccttcgattctgccttaaccgccgcagtattcagcgaaatgagaaggagcgccgccggcgctccttttttttgcctcgagttttcagtgttgctgcaccaccgccggttgggcggtcgaaaccagactgtgcagacggatatagcccagctgttccggcgtcaggccgctgaagcgcagctcaaagtcctggccgggtttcggcagcagcgagtcggcgctggcgatcggttgcgacagcgcctcggcggtcaacggccgcccggtggcgtcgtccagttggccccattccaccaccgcgttgaacggcggcagcgtggcctgtgagagggtgcgcacatgcagctgcgcctgcgtgccgttggcttcgctcttgatgtggctcagcgaaacgctcagctcgccgatgccgctctgcaaacgggcggcgctgcgggccgccggcagcaggtagacgccgttgtcggagtgctgattgagcatattctgccgctccagcgcggtggtttgatcggtcagcacgctcactttctggttcagcgcggcgacctgatggcgcagttgagggacggcggcgttgtgcgcgcagcctgccagcaacacggcggcggcgagcagggcgattttggggtaacaggttgtcatgacggcgatttcctatgctgaatctcctattatcagcttagtccgcccggaggggaaagtcatatcggcgccgcttcccggctgcgtgtcgcaacaaatggccgccgccctttgttgtggctgcacttcggggtaaactgcatttatctataaaaacgtttatcaggacgtgttatgcattgccctttctgcgccgccgttgataccaaagtcattgattcccgcctggtgggggacggttcgcaagtgcgccgccgccgccagtgtctggtgtgcaatgaacgcttcaccaccttcgaggtggccgagttggtgatgccgcgagtgattaaaagcgatgaggtgcgcgagccgttcaacgaagacaaattgcgccgcggcatgctgaaagcgctggaaaagcgcccggtaagctcggacgacgtggaaaacgcccttaaccatatcaaatcccaactgcgcgccaccggcgaacgcgaagtgccgaccaaactggtgggcaacctggtgatggacgcgttgaaaaagctggataaggtggcctacattcgctttgcgtcggtataccgcagcttcgaagacgtgcgcgagttcggcgaagagatcgcccgcctgcaagactaaaggatctttcatgcatcacgacgaattttacatggcgcgcgccttcgaactggcgcgcctggggcgtttcaccaccgcgcccaatccgaacgtcggctgcgttatcgtgcgcgatggcgaaattgtcggtgaaggctatcacttgcgcgccggcgagccgcacgcggaagtgcacgcgctgcgtatggcgggcgacaaggcgcgcggcgccaccgcctatgtcacgctcgaaccgtgcagccatcacggccgcacgccgccctgcgccgatgcgctggtggccgccggcgtaacgcgagtggtcgcggcgatgcaagatcccaatccgcaggtggcggggcgcgggctgtacaagctgcagcaggccggcgtcgaggtgcgtcatggcctgatgctggccgaagccgaagcggtcaacctgggcttcctcaaacgcatgcgcaccggtttcccctatgtgcaactgaagctgggcgcgtcgctggacgggcgcacggcgatggcctccggcgagagccagtggatcacctcacccgaagcgcgtcaggacgtgcagcgcctgcgcgcgcagagcgccgcgattctcagcaccagcgccaccgtgctggcggacgatccgtcgctgacggtgcgttgggatgagttggatgccgagacccagcgcctctatccgcgcgaaaatctgcgtcagccgctgcgcatcctgctcgacagccaaaatcgcattaccccacagcaccgcgtggtgcagcagccgggcgccacctggctggcgcggctgcaggcggatgaacagacctggccgcaagacgttgagcagtttatctgcccggcgcacggcggcggcgtcgatctggtggtgatgatgatgctgttggccaagcgccaggtgaattcaatctgggtggaggcgggcgcatcgctggccggcgcgctgctgcaggccggcctggtggatgagctcattttgtacatcgcgccaaaactgttgggcgataatggccgcggcctgtgtcatttgccgggccttgagcgtctggccgacgcaccggaattcgtctttagcgacgtgcgccaggtcggccccgatctgcgtttgcgcctgcgggcgaaacactgaatctcgcgcccgcgcgccggttttacaaaagcgccgcgcaggcgatgaaagaatatgatagaatccgcccccctgcggggtattgaacccatttttaaggaaagcccatgaaagttatcgaaggtgttgttgctactccaaatgcccgtgtggcgatcgcaattgcacgttttaacaatttcatcaacgacagcctgctggaaggcgccatcgacgcgctgaaacgcattggtcaggttgctgacgacaacatcaccgttgtctgggtcccgggcgcttacgagctgccgttgacggcgagcgtattggccaaaaccggcaaatacgacgcggttatcgcgctgggcaccgttatccgtgggggcaccgcgcacttcgaatatgtggcgggcgaagccagctccggcatcggcaacgttgcgatgaatgccgaaatcccggttgcctttggcgtgctgaccaccgaaagcatcgaacaggcgatcgaacgcgccggcaccaaagcgggcaacaagggcgctgaagccgcgttgaccgcacttgaaatgattaatgttatcaaagctattaaagcctgaatttagttaaggggaattccgtgaaacctgctgctcgtcgccgcgctcgtgagtgcgctgttcaagcgctttactcttggcagttgtctaaaaacgaccttgccgatgttgaacaccagttcctgacggagcaggatgtcaaagatgttgacgtcgcctattttcgcgagttgctgtccggcgcggcagtgaatgcaggtatgctggacgaactgatggcgccatacctgtcgcgtcagctcgaagagctgggccaggtggagcgcgcagtgctgcgcgtcgcgctgtttgaactgaaaatgcgcgaggatgtcccttacaaggtggcgatcaacgaagcgatcgagctggcgaaaaccttcggcgcggaagacagccacaagtttgtgaacggggtgctggataaagtggcgccaacccttcgcaagaaaaagtaaaacattaaggccggtatccccggccttaatttcttctcgtggaatatcgatatggcatgcggcgaatttgacctcattgcccgctattttgaccggtttaagcgcgtgcgccgggatgtacagttgggcattggagatgactgcgcactgctggcagtgccggaaaaacagctggtggccgtcagtaccgatacgttggtggcgggcgtgcacttcttaccggacatcgatccggccgatctcggttataaagcgctggcggtcaatctgagcgatctggcggcgatgggcgccgatccggcgtggctttcactggccctgaccctgccggaggtgaacgagccttggctgaaggccttcagcgacagcctgtttgatcagctcaactattacggcatgcagctgatcggcggtgataccacgcgcggcccgctgagcatgaccttgaccattcaggggctgatcccggccggccgggcgttaacccgcagcggcgcgcgcatcggcgactggatctacgtgaccggcacgctgggcgacagcgccgccggtctggcgattctgcaggatcgtctggcggtgccggaggcggcggcgcgcgattacctgatcgctcgccatctgcgcccgcagccgcgggtgctgcaggggcaggcgctgcgcgacctggccagctcggcgatcgacatctccgacggcctgatctccgatctgaaacacatcctgaaggccagcgactgtggcgcacgcatcgtgctggacgagctgccgatgtcgcaggcgctgagcagccacgcggatgccgagcaggcgctgcgttgggcgctggcgggcggcgaagattacgagctgtgcttcaccgtaccggagatcaaccgcggcgcgttggaagtggcgctgagccacctcggcgccgactacacctgcatcggccaaattggtccgctgtctgaaggcatccgctattatcgcaacgacgaagcggtagagctggactgggccgggttcgatcatttcaatgcggagccgggcactcatggatgaagccaagcgtcggctgcggatgagcaatccgtggcacctgctggccaccggttttggcagcggtttgtcgccggtgatgccgggcaccatgggatcgctggcggcgatcccgttctggctgctgctgatccagctgccgtggcagctctactcgctggcggtgatgttcagcatctgtatcggcgtctatatttgccaccgcacggcaaaagacatgaaggtgcacgatcacggcagcatcgtctgggatgagttcgtcggcatgtggatcacgctgatggcgctgccggtcaacgactggcgctgggtcgccgccggtttcgtcatcttccgcattctggatatgtggaagccgtggccgatccgctggttcgaccgcaacgtgcatggcggcatgggcatcatggtcgacgatatcatcgccggcgtgctgtccgccggtatcatctacctgattggccaccactggccgatcgggctgttctgacagacgggcgcggcgtttcgcgcccgctactctttattcaaaccccgtcacccgatgcggcacgtaagccgtctccagttccgccacctcttgcggcgacagactcaaatcgaccgcggcgatggcgtcatccaactgctcgctgcgcgaggcgccaacgatcggtgcgctgaccgccggcttgttcagcagccaggccagcgcgatctgcgcgcgtgaaacgccgcgttcttcggcgaggctggcgacgcgttcggcgatgatggcgtcgatgccttcagtttcctcgtacaggcttttgccgaactggtcggagaccagccgcgcggtggtttcgccccaggggcgggtcaggcggccgcgcgccagcgggctccacggcagcacggcgatgccttcggcggcgcacagcgggtgcatctcgcgctcttcttcgcgctggatcaggttgtattgatcctgcatgctgacgaagcgcgtccagccgtgcagatcggcggtgtacagcgctttggcgaactgccaggcgtacatggaagaggcgccgatgtaacgcgccttaccggctttcaccacctcgtgcagcgcttccagcgtctcttccagcggcgtttcgtaatcccagcggtggatttgcagcaaatcgacatagtcagtgcccaggcgccgcaggctgtcgtcgatggactgcatgatcttggcgcgcgacaaaccgcgctccaggttgctcagcgggaaatagaccttggtggcgaccactacgtcttcgcggcgtgcatagtcgcgcagcgcccggccgaggatctcctcgctgctgccgtcggaatagctgttggcggtgtcgaaaaagttgatgccggcttccagcgcctgtttcagcagcgggcggctgctctcttccggcagcgtccaggcgtgattgccgcggttcggttcgccgtaggtcatgcaacccaggcagatgcgtgagacgttcagatcggtgttgcccagtttcaggtacttcatgtttgcctcccattcacagctcagacagtaactgtagcgcggatcccggagggcggaaacgaaaacgcccccgggagcggaggcgttttttcaggcgcgggcggcgattactgcgccagccaggtttcgatttggcgctgaatgccggcggcgtccagccccagatcggcgcgcagctcttcctgggtgccctgcgagacgaagctgtccggcaggccgaggttcagcaccggcaccggacggcgtttggccatcagcagttcgttgacgccgctgccggcgccgcccatgatggcgttctcttccagcgtgaccagcgtttcatggctggcggccagttcgagcaccagctgctcgtccagcggcttgacgaagcgcatgtcgaccagcgtggcgttgagcgcttccgccgcttgcgcggcctccggcagcagggtgccgaagctgagaatggcgatcttttccccctggcgacgcaccacgcctttgccgatcggcagcaggctgagcggctccagcgccgcgccggtgccggtgccgcgcggatagcgcacggcgctcgggccgtcgttgtagtgatagccggtatacagcatctggcggcattcgttttcgtcgctcggcgtcatgatcaccatggtcgggatgcagcgcatgaacgacagatcgaacgccccctggtgggtctggccgtcggcacctacgatgccgccgcgatcgatggcgaacattaccggcaggttttggatcgccacgtcatggatcagctgatcgtaggcgcgttgcaggaaggtggaatagatcgccaccaccggcttgtagccgccgatcgccagcccggcggcgaaggtgaccgcgtgctgctcggcgatcgccacatcgaaatattgctgcggatagtcgcgcgagaactgcaccatgccggagccttcgcgcatcgccggcgtgatcgccatcagtgagctgtctttggcggcggtttcacacagccagtcgccgaagattttcgaataggtcggcagaccgccggcgcttttcggcagcgtgccgctggcgggatcgaacttcggcaccgcgtggaagctgatcggatccttctccgccggcgcgtaaccgcggcctttcttggtcatgatgtgcaacagctgcgggcctttcagatcgcgcatgtttttcaacgtggcgaccaggccctgtacgtcgtgcccgtctaccggaccgatgtagttgaagcccagctcttcgaacagcgtgcctggcaccaccatgcctttcaggtgctcttcggtgcgtttcaccagctccttgatcggcggcacgccggccagcactttcttgccgccttcgcgcagggtggagtaaagcttgccggacagcagctgcgccagatggttgttcagcgcgccgacgttttccgagatcgacatctcgttgtcgttcagcaccaccagcatgtccggattgatgtcgccggcgtggttcatcgcttcgaacgccatgccggcggtgatggcgccatcgccgatcacgcacaccgtgcggcggcctttgccttcacgctctgccgccaccgccatgccgaggccggcgctgatcgaggttgacgaatggccgaccgacagcacgtcatattcgctttcggcgcgccacgggaaggggtgcaggccgttcttttgccggatagtggcgatccgatcgcggcggccggtcaggattttgtgcgggtaggcctggtggccgacgtcccacaccagatgatcgaacggcgtgttgtagacgaaatgcaacgccaccgtcagttcgacggtacccagcccggaggcaaagtggccgctggagcgactgacgctgttcagcagatattgccgcagctcatcgcacagcttcggcaagctctctttgggcagtgagcggagttcctcggggttttccgctagcgccagggttgggtatttggctatatcaagactcattcgatactcatatcagaggagttaacgtcacacgttaattgtcgcgttcaataatgaagctggctaacgctcgcaatggcgctgtgttataagattgcgctgccaaagtgtctaatgcagctaatgcttcctgatagagatcccacgcttttgctttcgcgctgtcaagcccgagtaacgccgggtaggtactctttccgtgttgttggtccgctccctggcgcttgccgattttctcagtttcgccgacaacgtccaaaatgtcatcctgcacctggaacgccaggccgaccgcggcggcgtaacgatccagctgcggcagcgccgctcgtcctgcttcgccggcgctcagcgcgcccagacgcaccgcggcgcggatcagcgcgccggttttgtggcggtggatctgctccagcgcctgcaggtcgacgtgcttgccttcggcttccagatccagcgattggccgccgcacatgccggctacgccgctggctgtcgccagttcggagaccatcgccagccgatcgcgcagcgccacgtcgggcatttcggcatcggccaggatcgaaaacgccagcgtttgcagcgcatcgccggccaggatcgcgttggcttcgccgaatttaatgtgacaggtcggctggccacggcgcagatcgtcgtcgtccatcgccggcagatcgtcatggatcagcgagtaggcgtggatgcattccaccgccgccgccggcgcgtccaggttgctcagcgacacgccgaacatctggccggtggtgtacaccaggaacggacgcagacgcttgccgcccagcaaggcgccgtgacgcatcgccgccaccatgttgccgtcgttgaacggcagcggggcgatgaagtccagcagcgcgcgatcggcgcgccggcggaaaatctgcagttgatcggcaaaagcggccgatggggcgatctcagacatgtcggttactcggcatccggtgtgaaaggcgccagcgccgcatcgtcggcgctgtcgttaagaagtatctgcacacgctgttccgcctgttgcagtttctgctggccttggcgcgccagctgcacgccgcgttcgaattcgttcagcgcgtcttccagcggcagttcgcccgactccagacgcgtcacgatgctttccagctcgccgagggcgctttcaaagctggcagtttgctctgtactggctgattgtgctggttttttcggcataattttctttttacgtcatcatgtgaaccgtggcgccagagcctatcctagcggatcttgattagcaaatcatggcgctcatgtgtggttttgtgcgcagagcacggcgatatggtgatatactccgcgccgtaattcttatctgacaacaaagaccgccatgaagtttatcattaaattgttcccggaaatcaccatcaagagccaatctgtgcgcttgcgctttatcaagattctctcgaccaatattcgcaacgtcctgaagcagtatgatgaaacgctggcggtcgtccgtcactgggatcatatcgaagttcgcgccaaagatgaaaaccagcggccgatcattgccgacgcgctgacgcgcattcccggcatccaccatattctggaagtggaagatcgcgcctataccgatatccaccacatcttcgagcagacgctggaagcctaccgcgcccagctggaaggcaaaaccttctgcgtgcgcgtcaagcgccgcggcaagcaggcgttcaattcgcaggacgtggagcgttacgtcggcggcggtctgaaccagcatatcgacagcgcgcgcgttaacctgacccgaccgcaggtcacggtaaacctggagattgaagacgacaagctgatgctggtcaaacgccgtctcgaaggcatcggcggttatccggtcggcactcaggaagacgtgatgtcgctgatttccggcggtttcgactcgggcgtgtccagctatatgctgatgcgccgcggctgccgcgtgcacttctgcttcttcaacctgggcggcgccgcgcacgagattggcgtgaagcaggtggcgcactacctgtggaaccgtttcgccagctcgcacaaggtgcgcttcgtcgccatcgacttcgagccggtggtgggcgagatcctggagaaggtcgacgacggccagatgggcgtggtgctcaagcgcatgatggtgcgcgccgcttcgcaagtggccgaacgctatggcgtgcaggcgctggtgaccggtgaagcgctggggcaggtgtccagccagacgctgaccaacctgcgcctgatcgataacgcgtccgacaccctgatcctgcgcccgctgatttcgcacgataaagagcacatcatcaagctggcgcgcgaaatcggcaccgaagacttcgccaaaaccatgccggaatactgcggcgtgatttcgaagagcccgacggtgaaagccgtcaaggccaagatcgaagaggaagagagccacttcgatttcagcattctcgatcgggtggtgagcgaagcgaagaacgtcgatatccgctctatcgccgagcaggcgcaggagcaggtgaccgaagtggaaaccgtcgcggccttcggcgccgacgaggtgatcctggatatccgttccaacgacgagcaggaagagaagccgctgcagctggaacaggttgaagtgaaagcgctgccgttctacaagctgagcactcagttcggcgatctggatcagagcaaaacctatctgctgtactgcgagcgcggcgtaatgagccgcctgcaggcgctgtacctgctggagcagggcttcagcaacgtgaaggtttatcgcccgtaacgcgggcagcggcgtaaacgagaggggctgaaccggtgttcagccctttttttatcggcaagccgctcagtcgcggaaatcgtacatcccggggatcagcaccagctgcgcggcgatctccgccgctttggccttgccgagcagcagatcgatcagcttcagcgcgaactccatcgcggtgcccggcccctggctggtgagcagcttgacgcgcgcgtcgtacaccacgcggcgttccatccatttatccgccggtatctggtctttcaggcccgggaagccggtcatgttgccgaccgggaacagatcgtggtgctgcagcaccagcgccggcgccgcacagatggcggcgacgatattcccctgcaggtgcatctgccgcactttttccaccagcaacgggctgtcgcggaagcattccgcccccttcaggccgccgggcagcacgatggcgtcgaaaggctcatcgacgatcgccaccagcggcgcgtcggccagcagcttgacgccgcgcgaacaaacgatagtcagctcgccgtcaccggcgacgctggcggtagtgactttaacgcccgcccgcaccagcagatcgatggtggtgacggcttcggtttcttcgctaccaggtgccaggcaaaccagcgccgatacgctcatattcattttcctttcgtttaatcaattcaaacagccgcgcattctccggcagcgtgaggccgtgactgcgcgcacggcgcagcaggtagccggtgatgtagtcgatctcggtatgccgctggctgcggatatcctgcagcatcgacgaaacgttgtcggcggtgctgtggatcacgtccatcacatattgcatcaggccttcgcaggaggtgtggtagccctccatcgccatcacgctggcgacttcacgacacagcgtttcgatctgctccgggtagcgctgcagatcgccgttgcggcagccgtacagcgccgtcagcgggttgatcacgcagttgaccgccagcttgcgccagttggccgaggcgatgttgttgtgccaggcgacgtcgggcagcgcctgatgcagcacttccgccaggtggctgagatgctgggcggccggtgaggtggggccgatgtgggtgatgccggtggcgacgtgaataatggtgctgccttcgtggcgcgcggcgtgggtggtggtgccctgcaggatgggctggccgttttgcggcagctcctcctgggtacccatgccgttgtgcagcagcaaaatggcgcactgagggttcagcttcggcagcagcgcactgaccgcgctggagacctgccaggctttcagcgtcaccagcagcagctcgctctgcgcgaggtgctcaggatcgttggtgggcaaattgcgattaaacgagacgccttccggctcgatcacgttcacggcgcaaaaaggctgcggcactcttagccatccctgtacatcgtggccctgctgatacagccgggagagccacagttgtccgagcgcgccgcaaccaagaatggttattttcattcagtctccttggaaacacgggaataccgctcaattaccgtgatctaactataggctttatggcagcctgaagcgctatccctgcgtgcgttcagcagattttgtctgaggcggcaaagcggttatcatgctcggcatcaaaatcgcctaagctattaggcactcattcaggaggaagaagtatgccatctttcgacatcgtttccgaaattgatatgcaggaagtgcgtaacgccgttgagaacgccacccgcgatctcggcacccgctgggattttcgcaacgtgccggccagctttgagctaaacgagaaaaaccaaagcatcaaggttgccaccgagtctgatttccaggtgcagcagctgctcgacattctgcgcgaaaagctgagcaagcgcagcatcgacggcgccgcgctggagatcccggaagagtttacccacagcggtaaaacctacagcgtggaagccaagctgaagcaggggattgaaacctctgtagcgaagaaaatcgtcaagctgatcaaagacagcaagctgaaggtgcaggcgcagatccagggcgaagaagtgcgggtgaccggcaagtcacgcgacgatttgcagagcgtgatggcgctggtgcgcggcggcgatctggggcagccgttccagttcaagaacttccgcgattaatctcgacggggccggcattgccggccccgtttctttacagcgaattgaccagcgcttccagctgaccgcgattggtctgcttggtgtccaccttgacgtaggcgctgcgctcttccggcaccacgatcgcctcggccacgccgggctgcgccttcaggcggctttccagcgccgaatccttcaccgccagttcagacagcgtgatgcgcaggctgctgacatacggcggttctttcatggtgctgctgaccaagaaccagacggcggccaataccgcgccggcgataaacaccaggcctgccccctgcaaaccgtacagccagccgccgaggctgccgccgatcgccacgccgataaactggctggtggagtagactcccatcgcggtgcccttatagccggccggtgattctttgctgatcagcgaaggcagaatggcttccatcacgttgaaggccatgaagaacagctgcacgccggcgatgatgccccacaggtgcgcgccggagagccacagcagcacttcggcgcaaaacagcaccgccacgcagcccataaacacctgcttcatgcggcgatatttttcggcatagatgatgaaaggcaccacggcggcgaacgacaccagcatggtcaccaggtagacgatccagtgttcgctggccgccagcccggctttctccatcgccagcggcagcgccacgaagctcgacatcagcaggatatgcagacacatgatgccgaagttgagcttcagcaggcgcgagttgctcagcactttgcggaaactgccgcgcacgatgctggactcgcggttcaacaggtgagtatcggcggaaggcaccaccgccaatgtgatggcgatgccggccagcgccagcacggcgatcatccagaacagcgcatgcaggccgaaggcgtgggtaattatagggcccagaaccatggcgatggcgaaggtgatgccgaagctgacgccgatgaacgccatcgctttggtgcggttctgctcgcgggtcagatcggagagcagcgccattaccgcggcggcgatcgcgccggagccttgcaacgcgcggccgaggatcacaccccagatagagtcggtcgcggcggcgatcacgctgccgagggcaaagatcagcaggccgccgacgatcagcggcttacggccgatgcgatcggacaccagaccgaacgggatctgaaacaccgcctgcgccaggccgtagatgccgatggcgatgccgatcagcgcttcgctggcgccgttgagcgccatgccgtaggtggtcagcaccggcaataccataaacatgccgagcatgcgcagggagaatacggtgcccaatccccaggtagcgcggcgctcctgcggggtcattgaattatcgttcacatcaaacctcggtaaaaaccatgccatcagacgttgagacagcgcctgatggcatgatttctgtaaagctgcgtcattttagtgtgcggggcagggggggtaaatcgaatgttgtttaacagatattacagtttggccgcttttcggcgtgacaaataaaatgggccgcaaaagcggcccattcacagatgatttggcttaccaaacgtaggtcaccagcgcttcaggcgccgccgtggcgctgaagtcgatcgacatcatcacgctcagcgaggtgatggcgacgatggagaacacgaacagtttgcgcgcccagacgctgtcgttttcggttttataaccgcgcagcgccatgcccagccaccatacgctcaccgccgcagcgacgatcaggtatttgtagccggcgtagcccaccagggtcagcatcagcgtggcgatcataaatgccaggatgtagaccgtgatgtggttcttggcgacggaaatgcctttcaccaccggcagcaccggaatgttggccgcctggtaatctttaaagcggaagatagcgatcgcataagaatgcggcatctgccacaggctaaagatagccagcaggatcaacgcgccggcgtcgaactcgttggtcaccgcgcagtagccgataaccggcggcgcggcgcccgacaagctgccgatcagcgtgccgtagaccgaatggcgtttcatgtacaggctgtaaacgccgacataaaccacgaagcccatcaccgccagccacatggccagcgggttggccgcgatatacagcaacgcgaagcccgcaatacccaacacggtcgcataaaccagggtgacactcggcgcgatcaggccttttaccagcacccgattcttcgttctctccattttcttgtcgatgtcgcggtcgatgtagttgttaaacacacagcccgacgcgaccaccaacgagacacccaccagggtggcgagaaacaggggatagtcgatgctccctttggaagcgagcaggaatcccccaacgacagaaattaaattgccgaaaataattcctggtttagtgacttgcaggtattgcttaatcatcacgtgcagctcagctcttaatcgaccatcatattgatgttgaggttgtacataatccagagtgaacctacaacaacgataccgatgatcatagcggtgaacagcaatgccaccaggttccagcgctcttccgatgaggtgttcatgtgcaggaagtaaaccaggtgaacaatcacctggataaccgccataccgacaacaaccgccaggatggtggaatgagaggcagtgccgttcattaccatcgcaaatggaattaccgtcaggatgatcgacaggataaagccgatcaggtatgacttcacgctgccgtggcttgcgccgccgtgagaggtttcatgggatgaatggctcattacataacccccagcaggtagacaacggtaaatacgcagatccagaccacgtccaggaagtgccagaacaggctcaggcacatcaggcgggttttgttggtcgcggtcaggccgaacttgctcacctgaatcatcagcacgatgatccaaatcaggccggaagtcacgtgcagaccgtgggtgccgaccagcgcgaagaagctggacaggaacgcgctgcgatccggcccgaagccttcggcgatcaggtgatggaattcatagatttccatcgccacgaagcccagaccaaacaggaaggtcaggaacaaccaggtgtttacaccgccaactttacccttgttcatggcgatcatcgccatgccgtaggtgatggagctgaacaacagcaggaaagtttcgaccagaacaaacttcaggtcgaagatgtctttgcctgagggaccgccagcggtcccgttcaccaggactgcataagtcgcgaacaagctcgcaaacaaaatacagtcgctcatcaggtagatccagaatccgaagactttggtctctcccgcgtcgtggtgcccatgctctgcatgggctgcgttatgattggtcagagtttcagttgacatggttcacgcctgctttacggatttgttcgtagtgttggttctcaatgcgctcgatttcatcaacctgcacatagtagtcaacatcgtgatcgaagctcttgccgatccagacaacgatcataccgatgaagccggccagagccatccaccagatttcccaaatcattgcgaaaccgaataccaggctgaagaaggcgatgataacgccggcaccggtgttcttaggcatatgaatcggttcgtatttagccggtttcttataagcttcacctttttctttcatgtcccagaattcatcacggtcatgaatctgcggcactacggcaaagttatagaacggcggtggagacgaagttgaccactccagagtacgagcaccccatgggtcaccggtcagatcgcggttctgctcgcggtcacggatactgacgaagatctgggtcagctggcacaggatgccgcaggcgatcagcgccgcaccgccggctgcaaccagcagcagagggtggaactcagggttgatgttctggctgatacgacgggtcatgcccataaagcccaatgcgtacagcggcatgaaggcggtgaagaagccgatgatccagaaccagaacgcgcggatgccccatttttcgttcagcgtgaagccgaaggatttcgggaaccagtaggtcaggcccgcgaagcaaccgaacaccacgccgccgatgatgacgttgtggaagtgcgcgatcaggaacaggctgttgtgcagcacgaagttcgcgcccggcaccgccagcagaacgccggtcataccacccacggagaaggtgatgatgaagccaacggtccacagcattgcggagttgagcttgatgcggccctgatacatggtgaacagccagttgaagattttcaccccggtcgggatggaaatgatcatggtggcgataccgaagaaggcgttaacgttcgcgccggaccccatggtgaagaagtggtgcagccagacgatgaacgacagaacggtgatcgcgatggttgcccataccagtgaggtatagccgaacaggcgttttctggagaaggtcgcggtgacttcggagaacacgccgaacaccggcagaaccaggatatacacctctgggtgaccccaggcccaaatcaggttgatgtacatcatcatgttgccgcccatatcattggtgaagaaatgggtgcccagatagcgatccagggtcagcagcgcgatggtgacggtcagaattgggaaagaaacgatgatcaggacgttggtacacagcgccgcccaggtgaacaccggcatcttcatcataggcatgccaggggcacgcatcttcagaatggtggcgaagaagttcacgccggtcagcagggtacccagaccggaaatctgcagactccagatccagtaatcgaccccgacgccaggactgtactctttacccgacagcggcggatacgccagccaaccggtctgagcgaactcaccgacccccagggagatgttgatcagcaccacgcccaccacgaagaaccagaagctcagggagttcaggaacgggaaggcgacgtcgcgcgcaccgatttgcagcggcaccacgacgttcatcaggccaaccacgaaaggcatcgccatgaagaagatcatgatgacgccgtgcgcggtgaagatctggtcgtagtggtgcggcggcaggaacccggcttcgccggcggacgccaacgcctgctggctacgcatcatgatggcgtcggcaaagccgcgcagcagcatgaccatcgccacgatgatgtacatgataccaatttttttatggtcgaccgaagtcagccattcgctccacagccacttccatttaccgaaatacgtcagcagcgccagcactgccaggcccccgacaataattgcggctacggtgaccatgatgatcggttcgtggtacggaaccgcatcaagtgttaattttcccaacatcagttattcctcggctccggcgtgagcagcatgttcacccatgtccataccttggctcatgtccatgccttcgtgcgcgcctgcgcccttgtgcatatccatgtcgcccatgaatttggcaattgtttctttgaacaaattcggtttgacagcggcaaagtactcaaccgggttgttttcactcggctctgccagtttgttaaagtcgtcggtggtgttcaggtttttagacgatgccttcaccttggccacccactgatcgaagtcgccttcggtcggggtaacgatcgcggtgaacttcataccggagaagcctgcgccgctgtagctgctggagatgcctttgtaggcaccggcttcgttgccgatcaggtgcagtttggtctgcatgccggccatcgcataaatctgtccacccaactgcgggataaagaacgagttcattaccgagttagaggtgatcttgaattcgactggaacatctttcgggaaagccagctcattaacggtcgcaatgccttgttccgggtagatgaacagccatttccagtcgagcgacaccacttcgatcgtcatcggcttcttgtcggtgacaatcggcttgaacggatcgagttcgtgggtggtcttccaggtaatggtgccaaggatggcgatgataatgataggaatggtccagacgaccgcttcgatcttgttggagtgggcccagttcggactgtacttggcgtctttgttggaagcgcgatacttccaggcaaaggcgaacgccatgaagataactggcaccactacgatcaacatcaatgcgattgcagtgataatcagtgtccgttgctcaacaccaattgctcctttgggattcatcaaaaccatatcgcagccactgagcaatacagtgcctgcgattaatgacagcatcccaatacttttattgtatttcttaagtctcatctaacgacctcaataacaaaggctcaattgtcgtttcatgtgtgcgggcattttacgggaaggttgcagtactgtaaacatgcttaagggagtgtcagcggcttgttgacactttctgttaagggggtcacagatgtaaccctgcgtgacaatttaccaatgacaacaacgcgttggcacgctgaatcgtgacgagcagcccgtatgttaaggaaaactaaaggtatgatgaatttggcgaagaaatgcgcggcggggaaatacgcagaaaaggtttatttaatgtaaaataattgtgtcttaaaggtgaatttaattttatttccgagtgcggcagtcggataaaaaaataatttccgcgccgattatctttttttaccgaaataaatatatccccggatcgctttttttttcggccggtgaaatcaccggccggtcagattatgccaaacgggtgcggcgcagggcgaggtaatccaacgtactgcccatggcgacgccgagcaggctcagcgcggcgccgacctgcagcagccgatcggccaactgcggggcctgagtccaatccagcgcattggtgataagcaacagcaaccacaggcccaacagcgaacagcctagcgtcagtaagcgcagcgcccaacggtaagattctgaaaactcagtgcgcggcataaaattgccatgctgctgggtgtgctccagcgtctgacgacagataccgagcagcagcaagccgggcagggcagcggcgatagagaacaggtagaacaacggccaaccgtgggcttcaacgaaccagccggcgatcgggccgacatagacgcgccctacggcggacagcgccgacagcagcgcgaactgggtggcggagaacgaccggttgcacagcgtcattagcagcgccacgaaggccgcggtgcccatgccgccacacagattttcgaggaagatggcgctgcccatggtgagcaggctcttgtcggtcaccgccaggatccaatacccgagattggagaccgcctgcaggacgccgaacagcatcagcgcgcggaacaggctgagacgttgcatcagcacgccgccgaacagggcgccgacgatggtcgcgaacaggccgagggttttgttcaccagcccgacttcaccggcgtcgaaccccacgccgcggatcaggaaggtggtactcaggctgccggcgaaggcgtcgcccattttgtacatcacgattagcagcaggatcagccaggcgttgttgcggccgaagaaatcgcgcagcggcgcgacgaccgcctgttccatggtgcgcggcgccgggatgctttcatccggctccggcgccaacagcgtggcggccacgccgatcagcatcaatccggccatcagccagtaggtggcttgccagccgaaatagcgatctgccagccacagcgccaggccgccggaaaccagcatcgccagccgataacccagcaccgagatcgccgcgcccgtgccgcgttcttcggctttcagcagatcggttttataggcgtcgaacacgatatcttgcgaggcggagcagaacgccaccagcaccgccaacgccgccagccaccacaggtgctgcgcgggttgcataaagcccatcgccacaatcgccgccaccagcaacagctggctgatcagcagccaaccgcgccgccgcccgagaaacggcggggtatagcggtccatgaacggcgaccagaggaatttgaagacgtaggcctggcctaccagcgagaagatgccgatggttttcagatcgatattttcgacggtcatccaggcttgcagcgtgccggaggtcaatgccagcggcagacccgacgcgaagcccagcagcagcagaatggcggagttacgctgggtgaagatgttcagatagtgtttcgacatgagttccctgtctgcgccgcccgatccgccgggcggcgccaggcgcgccgattagcgcgcgttttgcttgatgaaatcgttgacgctggtgtcctgagccatgtcggcgatcacgtcgcccagcacggagttgacggcgtcggtgatcttctcgttggtcgccgtgaaggcgccctgcacgttataggtcgagcggtaattcttcacctgcttgttgccgttcttcgcctgggcgatgatcgagatgtcggctttggtggtgatgttgtagcgcaggttaccttcggcgacgtccgcgtacaggttattgacgacgatttgcagcgccaccgggccgtcggcaccgatcatgtagccgcgtgcgcccatctgtttctccagcacttcctgcagcaggaaacgcagatcgcgcgatggcgtcagcgtgaccaactggccgtcgcggttcaccttggccagcgcctggtcggtgcgctgatccgcgccgttgatgctgacagtgatgccctgcagggtaggatcctgctgcggcagaacgattttcggcgtgacgttcagggtgttgctgctggtcgcgcagccggccagcagcagggcggccagcaaaggaagacaaagtttctttaacatgttttctgtctcattctcgatggatttagcaataatcagagcgggatagccgacaacaaattgccgacatcatagcatcgccgccgtgcggtggaagcgcggaaggcgcctgagtgacaaatttttacctgccgttgataaaaacacgcttttttggcccgctcaatcggataatcccccaagcggcggggatggcgctcatcatttgaccgcagaaaagagaaatttgtcccggcgatggtctaaacgggggaaaaccggctaatattgaactagatgggcacggtcctctgccggtgttgtaaggagatcctatgattcgcgagcaaatagaagcaaagttaagggcggcgtttgagcccgcgtatctggaagtcgttgatgaaagctatcgtcataacgttccggcgggttcagaaagccatttcaaagtggtattggtcagcgatcgcttcgtcggcgaacgttttttgacgcgccaccgctccatctacggcgtattgtcggaggagctggcggacggcgtacatgcgctggcgctgcacacctatacgctcaaagagtgggaaggtctgcaggataccgtgccggcctcgccgccgtgccgcggcgccggcacgctggcctgagggggaaattttcaggtatcagtggaactttgcccttgaattagggtattactactgacgaattttgaaacggcctgcgggccgtttctgtttttgacgacgacacggccgacgcgcaatgtggccaacgttcggtctgttttggcggcctttgggcgatcgaatcggcaaaagtgtgagttttagcgcgcctgcgccgcctagctttcctcgactcgccacgcatgcgccgctataatgtcgcgtcttatttttccggaatggtttcgggacgcttctgtcatcagggaactcggttcttatctgtagccgtcctggttcttggaacggagttgaccgagcactgtgatttttttgaggtaacaagatgcaagtttcagtagaaaccactcaaggccttgggcgccgtctctctattactgtaccggctgatactatcaagcaggcggtgaagaaagagctgatcaacgcagcgaaaagcgtgcgtatcgacggcttccgcaaaggcaaagtgccgatgaacatcgtggaacagcgttacggcgcctctgttcgtcaggacgtgctgggcgaagcgatgcagcgcagcttcgttgacgcgatcatcaaagaaaagattaatccggccggcgcaccaaactacgtgccgggcgagtacaaagaaggtgaagacttcactttctccgttgaattcgaagtgtatccagaagttgagctgaaaggcctggaaaacatcgaagtcgaaaaacctgtagttgaagtgaacgacgaagacgtcgacgcgatgctggataccctgcgcaagcagcaggccacctggaaagaaaccgatcgcgcggcggaagctgaagatcgcgtgaccgttgacttcaccggttctatcgacggtgaagagttcgaaggcggcaaagcgtccgacttcgtgctggcaatgggccagggccgcatgatcccaggcttcgaagaaggcctggtcggtcacaaagcgggcgaagagttctccatcgacgtgaacttcccggaagactaccatgcggaaaacctgaagggcaaagcggccaaattcgctatcgtgctgaagaaagttgaagagcgcgagctgccggaactgaccgaagagttcatcaagcgtttcggcgtggcggacggttccgttgccggcctgcgcaccgaggttcgcaagaacatggagcgcgagctgaaaggcgccgtgcgtaaccgcatcaagtctcaggcgatcgaaggcctggtgagcgcgaacgaaatcgacgtgcctgctgccctgatcgacggcgaaatcgacgtgctgcgtcgtcaggctgcacagcgtttcggcggcaacgagaagcaagcgctggaactgccacgtgaactgttcgaagagcaggcgaaacgccgcgtagtggttggcctgctgctgggcgaagtgatcagcaccaacgacctgaaagctgacgaagaccgcgtgaagacgctgatcgaagaaatggcctccgcctacgaagatccgagcgaagtcatcgaattctacagcaaaaacaaagagctgatgaacaacatgcgcaacgtggctctggaagagcaagcggttgaagccctgctggcaaaagcgaaagtgactgaaaaagccactaccttcagcgagctgatgaaccaaactcaacaggcgtaatgcctgcgtgccgggcgcgatgaacggcgcccccggtttcgcctggcgaaccggcgcacgatgaaaaagcccgcaacctcaggttgcgggcttttctttttgccacgttgctgattaatctcaggttaagcgggataatatgcactatatttaccctgttgcctggggaactggctggcatgataaaggtcagaataacggcatcgtttccggcgcgcggagaaaatcggcctctgggcttgaaatcgcgccgggctccccccatctgtaaagaatgattctggggctgtttgccaaagtgcgcgggataaaacaaccgtcgggtacgtgcggcgcgggtcgaatgcttgagcatagtcatcatggccgttctcaagtagaatcggcgtattagggtgacaccctggccgccaaggcaatttctattaggagacggtaatgtcatacagtggcgaacgagatcaatttgcaccgaacatggcgctggtgccgatggtggtagagcagacttcacgcggggagcgttcttacgacatttattcccgcctgctgaaagagcgcatcattttcctgaccggccaggtggaagatcacatggccaacctgatcgtggcgcaaatgttgttcctcgaagcggaaagcccggaaaaagacatttacctctacatcaactcgccgggtggggtaattaccgcgggcatgtcaatttacgacaccatgaagttcatcaagccggacgtcagcaccatctgtatgggccaggcgtgctcgatgggctccttcctgctgaccgcgggcgccaaaggcaaacgtttctgcctgccgaactcgcgcgtgatgattcaccagccgctgggcggctaccagggccaggcgacggacatcgaaatccacgcgcgtgaaatcctcaaggtgaaagcgcgcatgaacgaactgatggccgagcataccggccagccgctggagcagatcgagcgcgataccgagcgcgatcgctttatgaccgcggacgaagccgtggaatacggcctggttgacggcattctgacacaccgcagctagaaccacgcggcgccgatggactatagtaatcagagtgggcaggggctcgctctgttgtagcccctcggcgttcccgatatgagtttgggcgcactgccgccgtgattttcctgcgggacaagactaaagaagaggtttgactgatgacagataagcgcaaagacggttcaggaaagctgctgtactgctctttttgcggcaaaagccagcatgaagtgcgtaagctgattgccgggccgtcagtgtatatctgcgatgaatgtgtcgatctgtgtaacgacattattcgcgaagagattaaagaagttgccccgcatcgtgagcgcagtgcgctgccgacgccacacgaaattcgccaccacctggatgactacgtcatcggccaggagcaggcgaagaaagtgctggcggttgcggtgtacaaccactacaaacgcctgcgcaacggcgataccagcaacggtatcgagttgggcaagagcaacatcttgctgatcggcccgaccggcagcggcaagactctgctggcggaaacgctggcgcgcttcctggacgtgccgttcaccatggccgacgccaccacgctgaccgaagccggttacgtgggcgaggacgtggaaaatattatccagaagctgttgcaaaaatgtgactatgacgtgcagaaagcgcagcgcggcatcgtttatatcgatgaaatcgataagatttcccgtaagtctgacaatccgtcgatcacgcgtgacgtctcgggtgaaggcgtgcagcaggcgctgctgaagctgattgaaggcaccatcgccgcggttccaccgcagggcgggcgcaagcatccgcaacaggaattcctgcaggtcgatacttccaagatcctgtttatctgcggcggcgcatttgccggcctggataaggtgatcggtcaacgcgtcaacaccggctccggcatcggcttcggcgcgaccgtcaagggcgagtccgagaaggccaccgaaggcgaactgctgctgcaggccgaaccggaagatttgatcaagtttggtctgatccctgagtttatcggccgtctgccggtggtggcgaccctgagcgagctgagcgaggacgcgctgattcagatcctgaaagagccgaagaacgccctgaccaagcagtatcaggcgctgttcaatctggaaggcgtggagctggagttccgcgacgaagcgctgaacgccatcgccaagaaagccatggcgcgcaaaaccggcgcccggggcctgcgttccatcgtggaaggcgcgctgctcgacaccatgtacgatctgccgtcgatggacagcgtagacaaagtggtgatcgacgagtcggtgatcgccggccaatccaaaccgctgctgatttacggcaagcctgaagcccaggcgtctggcgaataattagccagttaaaccagcgcgttatcagcaaaatgggggatttcatcccccatttctttttcctgcattcttgccgttgaatgtaagagattcatccccatatactcattaaccagattttatgaaacgttagatgcttgcgtctcatgagattccccctcaacctggcggaaattaaactaagagagagctctatgaaccctgagcgttccgaacgcattgaaatccccgttttgccattgcgcgacgtggtggtttatccgcacatggtgatcccgttatttgttggccgggaaaaatcgattcggtgcctcgaagccgcaatggatcacgataagaagatcatgctggtggcacagaaagaggcctcaacggatgaacctggcattaacgacttgttctcggtcggcaccgtagcgtcgatcctgcagatgctgaagctgccggacggcacggtaaaagtgctggtcgaggggctgcagcgcgcacgcatcactacgctgtccgacagcggtgagcatttcgccgcgcaggcggaataccttgagtcgccggctatcgacgagcgcgagcaggaagtgctggtgcgcaccgcgatcaatcagtttgaaggctatatcaaactgaataaaaaaatcccgccggaggtgctgacgtcactcaacagcatcgacgacgccgcgcgcctggcggacaccatcgccgcccacatgccgctgaaactcagcgacaagcagtcggtgctcgagatgtccgacatcaccgagcgtctggaatacctgatggcgatgatggaatcggagatcgacctgctgcaggttgagaaacgcatccgtaaccgcgtcaagaagcagatggagaagagccagcgcgagtactatctgaatgagcagatgaaggcgattcagaaagaactgggcgagatggacgacgcgccggacgagcacgaagcgctgaagcgcaagatcgatgcggcgaaaatgccgaaagaggcgcgcgaaaaaaccgaagcggaactgcaaaagctgaagatgatgtcgccgatgtcggcggaagcgaccgtggtgcgcggctacatcgactggatgctgcaggtgccgtggaatgcgcgcagcaaggtgaaaaaagacctgaacaaggcgcaggaagtgctcgataccgatcactacggcctggagcgcgtgaaagatcgcatcctcgagtacctcgcggtacagagccgcgtcagcaaaattaaggggccgatcctgtgtctggtggggccgccgggcgtgggtaaaacctcgctggggcagtcgatcgccaaggcgaccggtcgccagtacgtgcgcatggcgctgggcggcgtgcgtgacgaagcggaaatccgcggtcaccgtcgtacctacatcggatcgatgccgggcaaactgatccagaagatggccaaggttggggtgaagaacccgctgttcctgctggatgagatcgacaagatgtcttccgacatgcgcggcgatccggcctccgctctgctggaggtgctggatccggaacagaacgtggcgttcaacgaccactacctggaagtggattacgatctgtccgacgtgatgtttgtcgccacctcgaactcgatgaacattcctgcgccgctgctggatcgtatggaagtaatccgcctgtcgggttataccgaggacgagaagctcaacatcgccaaacagcacctgctgccgaagcagctcgagcgcaatgcgctgaaaaaaggcgagttgacggtcgacgacagcgccatcatcggcattattcgcttctatacccgcgaagccggggtgcgcagcctggagcgtgaaatctccaaactgtgccgtaaagcggtgaaaacgctgctgatggacaagaagcgcaagcatatcgagatcaacggcgacaacctgaaggattacctgggcgtgcagcgcgtcgattacggccgtgcggataccgaaaaccgcgtgggcgaagtcaccgggctggcgtggacggaagtgggcggcgatttgctgaccatcgaaaccgcctgcgtgccgggcaaaggcaagctgacctacaccggttctctgggtgaagtgatgcaggaatcgattcaggcggcgctgaccgtggtgcgcgcgcgcgcggagaaattgggcatcaacgccgatttctacgagaaacgcgacatccacgtgcacgtgccggaaggggcgacgccgaaagacggcccgagcgccggtatcgcgatgtgcaccgcgctggtctcctgcctgaccggcaacccggtacgcgccgatgtggcgatgaccggcgagatcacgctgcgcggtcaggtgttgccgatcggcggcctgaaagagaagctgctggcggcgcatcgcggcggcatcaaaaccgtgctgatcccttacgagaacaagcgcgatctggaagagatcccggacaatgttatcgccgatctggagattcatccggtgcagcgaatcgatgaagttttgaacattgcgttgcaaaacccggccttcggcgcactgccggtagcggcaaaatagtgacgaatcgcaaaaaccattgataaaacttatactggcaagccatttcggacttgccagtatttttttgtaccgctaagttagatctctgtcggcccgcgttttgtcacccagtcggtggcttgccaaggttcgatgggattgatataacagctgcgctgtcgcaaccgtagggatttttcggtgcgacgatagaattctagaggggatgatagagtgaataagtcacaactgatcgacaagattgccgcaggtgctgatatttccaaagcggcagcgggacgtgctttagacgcagtaatcgcttccgttaccgactccctgaaagcaggggatgacgtggctctggtaggtttcggttcctttaccgtgcgtgaacgttcggcccgtaccggccgcaacccgcaaaccggtaaagagatcaagatcgcggcagccaaagtacctgccttccgtgcagggaaagcgctgaaagacgctgtaaactgatttagcgtctaaccgtttagcgtaacagggttttgtaataaacaatcacctgacgcagcggtgctggtaaggtaagatacaaggcgcatcggactgatgcgctttttttatttttgtcgcagggaacgcgcctgcgcaagggttgttaatccacatcacagcggagtgttgtcacactatgatggacaatttacgcgcggctgccaatcacgtcgtgctcaaaatcatcctggccctgatcatcctgtcattcgttctgaccggggtgggtaactacctgatcggcggctccggcgattatgctgcgaaagtaaatggtcagacgatcgaacgcgctcagctggaacaggctttccaaagtgagcgcagccgcatgcagcagcagctgggtgaccagttctctgcgctggccggcaacgaaggctacatgcagcagatgcgccgtcaggtgttgtcccagttgatcgacaacatgctgctcgaccagtatgccaagaagctgggcctggcggtcagcgacgatcagatcaaggacgccatccgcaaggcgccttacttccagaccaacggccagttcgataacgccaaatatctcgatctgattggccgcatgggctacaccgccgacaacttcgcgcagtcgatgcgtcagcagttggtcaatcagcaggtgatccaggccttcggcgagtccggtttcgtgctgccgtctgaatcgcaagccatggcggcgctggtgctgcaggagcgcgacgtgcgcctggcgaccatcgatttgaaagcgctgcaggcgaaacagagcgccggcgacgacgaactgaaggcgtattacgatcagaacaagaacagcttcatcgccccggagcaggtgaaggtgagctatatcccgctggacgccgcgtccatgcaggacaaggtgaaagtgagcgaagaggacatcaacgcttactacgaccagcacaagagcagctacggccagccggagcgtaaaaactacagcgtgatccagctgaaaaccgaggcggaagccaacgcggcgctggatgagctgaagaagggcgccgatttcgccaccctggcgaaagaaaaatccaccgacatcatctcacgccgcaccggcggcgagctgggttggctggagccggaaaccaccgccgacgaactgaagcaggctaacctgaccgagaaagggcagctgtctggcgtagtgaaatcctccgtcggctacctgatcgtgcgtttgaacgacatcgaacctgagaaactgaaaccgctgagcgaagtgcatgacgccatcgccaagcaggtgcagcaggagaaagcggtagacgcctattacgcgctgcagcagaaggtgagcgaagcggcgaccagcgacaacgaatctttggcctcggctgaggaagcggccggcgtgaaagcggcgcaaagcgactggttcacccgcgacaacatccctgccgcgctgaacttcaaaccggtggtgcaggcgatcttcgacggctcgctgatcggcgagaacggcgtgccgggcagcaactccgacgtgatcaccgtagacggcgaccgcgctttcgtggtgcgcgtgagcggccacaagccggaaggcatcgaaccgttcgaccaggtaaaagaccgcgtggcggaactggtgaaacgcaacaaggcgctgcaggcagcgaagctgcagggcgagaagctgctggttgagctgaagcagggcaagggcgacgaagcgatgaaagccgccggcctgagctttggcgccgtgcagaagatggcgcgcgcgccggaagacagccagctggtggagagcgtgttcgcgctgccgcacccgcaggacggcaagccggtgtacggcatgtcgcaggatcgtcaggacaacgtggtgctgattgcgcttgatgcggtgaagccaggcacgctgccggaagacgaaatgaaaaccttcgtcggcaagatggaagagggcgcgaccggcgtttccttcgattcgctgctggcgagcctgcgtaaagaagccaagatcaaaatgggcgccgctgagcaacagcctcagtaatcgccgcatttttctgcaacgcagtgcaacaaacaaaggccgctttcgcggccttttccatatctgacatctgtcgattgctgaatatccgccgccgcggcaaggtagccgtgctgtcacacacaaggaggatacagcatgcaatattcagagaaaaaagcgtttttcggttaccgtcgtcacgttaacgccgcgctgaccgcgctgttgttatgcctggccgggccggccgccgcggtggaaaaaaacgaggcgccgatgctctcaacaccggcgagccatggcggacaatcggtgatgaccaaggcaaccgaagaggcggcggtcagcatcaatcaggccactgccgaacaactggccgccgccttgagcggcgtcggcctgaagaaggcggaaggcatcgtgcgctatcgcgaacagaacgggccgttcacccaggttgagcagttgcaggaggtgccgggcatcgggccggcgctgtttgagaagaaccgcacccggctgaaaatgtgatcccggtcgcggctgcgtggcaaaatggcgctgaggccgtgactcctctgctacattttacaggtcttaccagtttggcgcgttgaccaaacgggcgagggagccagagcggctccctctttctgtaatcaccaggcaggagcgatcgttccctatgcaaacctttatcaaagttcgcggttatcaccttgatgtttaccagcacgttaacaacgcccgctatctggagtttctggaagaggcgcgttgggagtggttggagaacgaagccgggttccgctggatgacggaaaacaacatcgctttcatcgtggtgaacatcaatatcaattaccgcagcccggcggtattgggggataagctgcgtatcgacagccagatggtgcagctcaacggcaagagcggggtgctgagccaaaaggtgacgcaggatccggcggggacgccggtggcagacgcgctgctgactttcgtgtgcgtcgatctgaaaacgcagcgtgcgctgccgatcgaaggagaattgcgcgagcacctggaggcgctcacgctgaaggataatccgcagtaagctcacgggcggcataggctgccgccgtcactgccctcaggccaggccggctttctgcttcaacgccgccatcacttctgcctggttggcccggtactgcgtcaggccattggcgcgcaggttgcaggcggcgcactcgccgcagccgtcacccttgatgccgttgtagcaggtcagcgtatcctggcgtacgcgatccagctggtggtaataatccgccagcgcccaggtctcggccttgttcagccacatcagcggcgtttcgaagcggatatcgcgggcgatgcccagcgtcaccgccttgttcagcgctttaacgaactcgtcgcggcaatccgggtagccggagaaatcggtttcacacacgccggtgatcaccgcttccgcttcgacctggtaggcgtagatcgccgccagcgtcagaaacaggatgttgcggcccggtacgaaggtgctcggcagcgcatttttctggttgggatcgtaggtgggaaccggaatattgtcgcgcgtcaggctgctgacggccagctcattaagcagcgttacgtccagcaccttgtgcgccttggcgccgagggctaccgacagctcttgagccacctcaatctcggcgcgatggcgctggccgtaatcgaacgtgacgcagtgaacttcgtcatactgttgcaatgcctggattaagcaggtcgtggagtcttgtccaccgctgaaaacgacaaccgcgcgcttcataaaatcacctttttgggctttggcctctcccgatacacattcgggcggcaggataaaaattgcgttgcggcgacaatagtagcagaaagggccgccaggcgcagggcggttcggctcaggccggtgcgttgtccaccggcggcggcagccacgcctggcaaaaatcgaaccagccgtgggcggtcagcgtgacgccatgcatgcgcggcggcgcgctgatctgatactggtagtggaacagcggcgtgatgatggcggcggccatcagccgttgataataggcctgcaaccgtgcgaaacgcggttgctgcgcctgcagctgctggatctgccgcagcgtatcctgttgctgctgccagcggctttccgtcaggatgccgcgccacagcgtatcctgccgcagccagctctccagcgtcgcctccggcgcttcgccgatcaggttgtccgccagcagcagatcggcctgggcgatctgttcctcgctttgccagcgcttgccggcatagtaacgcacctccagctcgcagccgtgctgcgcgagcaaccgctgtagcgcggccgtcaccgtttccagctcgaccggcggccgatacagcagcgtcagccgggcgggcagggcgacgtcctcttcgacctgttggtgggggatgcgccagccgggcagcatttcatggctgggggtgatcacgctgttggggatcggcagatggctcagcaggccggactgctggatcagcatcagcagcttttgcccctgggcttcgttcagcacgccgtggcgcaggttcagcgccagataacaccagcccaggctcatgctgcgctgcaccggccgggcctgcgccaaatcgtcttgctggccgatggtgatgcgcaccggatgctggcaactggtgtaggtgccggcggtaggtaaatcgggggtgatccagtattcgatggtatccagatacggatgctgcagatgataaccggcgtgctgttccagccgcaccagctgcggctcattcagtgtcagcttgaacgggccggcgccgatggccggcagctccgggtgagtcatcaggcaaggcagctccgccagccggtgggccagccagtagtccggcaggtgcagatcgaactgaatgcacaacggatgcggcaggctgatgcgcgtgacgttggccaggctcggttggctgcgcggatggcgctgcagtttttccagcgtttgcagcagttggtggccggtcaacggttcgccgttgtgccagcgcagctggctgcgcagaaagaagcgccagcgcaggccgcgatcgctaatctgccaatggtgcgccagatcgggctgcggttccgggttaccggtcatcaggcgcgtcagtccggcgtgcagggtcgacaccagatgttgttcggcgcggccggtcaatgtgagcgggtcgagcgcttccagcgtgcggtaatagggaatacgcagcgtcgggctgccggcctgccattgcccgccgaggtgcgggctgagcagatcctgcaggtgctgcggatcgagctgcgccatctccagcgctccctgatgattgccctgttgcagcagctgttgaagcagctgtgcgcgcagttcatccggggttttcaggcagtgcaggcgagcgcgcttaccgcggccgggctgcgaataccagctcagccagccctgatcctgcagctgctgcaccagcgtgcgggcgtgccgctcgctgcagtagaacatcgccgccagctcgccgatggtcacggcgaccggcgcgctgccgagctgttgatacaggcgttgatattggctgagacggtgaaccaggcgcatgggcagaaatccggaacagttttctcaaattgttcactattacttccgcaaataccatcccatactgcagtgattgtaatcgcgttcacattcatgaggtctttatgtatcgcctggcagctttcgatatggacggcacgctgttgatgccggatcaccgggttggcccggaaacgctggcggtgctgaaccagctggtggagcgggagatggtggtgacgttcgccaccgggcgccactacctcgatgcgcaaccgatcatggcgcaactggggctgcagggttacctgatcaccggcaacggcacgcgggtatatgacaaccgtggccaacagctgcacgccaccgacctgccggcggcggtggccgaagaggtgctgcatcatcattggcgcacccgcgccagcatgcatgtattccgcgacgaaggttggctgaccgagtttcccgtgccggaagagatgctgcgggcgcatcacctgagcggttttcgttttcaactggccgatgtgcgccgtctgccggcgttcggcaacagcaaggtgtgctttgtcgcgccacatgaggagttgctggcgttgcaggtgcagctgcgggcgcaattgggcgatgaggcagacctgtgcttttccgcctacgactgtctggaggtgctgccggtcggttgcaacaaaggcacggcgctggagcggctgagccgtcatctggggctgacgatggccgactgcatggcgttcggcgacgcgatgaacgacaaagagatgctgggagcggtggggcacggcgtggtgatgggaaacgccctgccgcagctgaaatccctgctgccgcagctaccggttatcggccattgccaacaacaggcggtggctcactatttacaacattggctgcgttcaccttgcctcacctattcccccgaagaatgaggttctccttacagccggccgggtatgactacccggcttttttttacccgaagcctggcgttacaaatccgccagctgcgcgagatacggctgcagatcgccgatgttgttgctgacccattccgggttgtaataagtatccagataacgctcgccgctgtcgcacagcagggtaacgatcgacccttgctcgccgttttcccgcatctgcttcgccaactgcagcgcaccccaaacgttggtgccggtagaggcgccaaccttgcggcccagcacgccttccagccagtgaatggtggcgacgctggcggcatccggcacgcgcagcatgttgtcgaccaccgacgggatgaacgacggctcggcgcgcgggcggccgatgccttcgatacggctgccgcagctgccgatcagggtgcgatcgccgtggtggaagcagtcatagaacaccgagttttccggatcgaccaccgtcaattgggtgtcgtgcccctgatagcggatgtagcgccccagcgtggcagaggtgccgccggtgccggcgctcatcacgatgtgtttcggcaccgggaaaggttcgcgcgccatctggcggaagatgctgtcggcgatgttgttgttgccgcgccagtcggtggcgcgctcggcgtaggtgaactgatccatatagtggccgttcagctctttcgccagctgttcggaggcagcgtagatttgggcggcatgatcgacgaaatgacagcggccgccgtaaaaggcgatctgttccaccttgcggcgcgcggtgcaggacggcattaccgcgatgaacggcaggccgatcagacgggcgaagtaggcttcggacaccgcggtgctgccggacgaggcctcgatgatggtggtgttctcggtgatccagccgttgcacaggccataaaggaacagcgagcgcgccaggcggtgtttcaggctgccggtcgggtgggtgctctcgtctttcaggtacaggcagatgccgggaaacgccggcaggttcaggcgaatcaggtgcgtatcggcggagcgctgaaaatccgcttctatttcaccgatagcatattttacccaagagtttgtcatgatatggcctcagaatagggggctggtttatggcgtagcatagcctgtcggcgggaaaaaaggattgccattttccctgtttaatcgcctaatgggagaaaatttttctccgggtggccgctatgttagataaaacagaccgtaagctgctgtgcatgctgcagcaagattgcacccagtcgctgcaggcgctggccgatgcggttaatttgacctctacgccatgctggaagcgcctgaagcgtctggaagacgaaggctatatccgcggccgggtggccttgctggataatgaaaagctcggcctggggctgacggcgttcgtgctgatcaagacccagcagcacagcagcgagtggtatcaggcgtttgtgcagctgaccagccagatgcccgaggtgctggcgttctaccggatggcgggggagtacgactaccttatgcaggtcgaagtggcggacatgaaaagctacgacggcttttataagcgcctggtgaacggcgtaccgggccttattgacgtcacctcgagctttgccatggaaaaaatcaaatacaccactgcgctgccggtgccggagtgaaaagttaaccggacgggcggctcaacggtggtatcctgctctgctgaagcagaaaaagagacaaatcccataaaatcctggaatcaaactgcgtgagattatttgcacaaatcggctggtacttccgccgggagtggcgccgctacctcggggcggtggtgctgctgatcgtcatcgccatcctgcaactgttgccgcctaagctggtcggcatcatcgtggatggcgtcaccgaaaaacagatgtccaccggcgtgctgttggcctggctcgggctgatgatcggcaccgcgatagtcgtttacctgctgcgctatgtgtggcgggtgctgctgttcggcgcttcctaccagctggcggtcgaactgcgcgaaaacttttaccgccagctcagccgacaaaacccggcgttctacctgcgccatcgcaccggcgacctgatggcgcgcgccaccaacgatgtggatcgcgtggtgttcgccgccggtgaaggcgtgctgacgttggtggattcgctggtgatgggggtggtggtgctggtggtgatgagcacccaaatcagctggcagctgacggtgttggcgttaatcccgatgccgctgatggcgatcgccatcaaatattacggcgaccagctgcaccagcgctttaaatcggcgcaggcggcgttttccagcctgaacgatcaggcgcaggaaagcatgaccagcatccgcatgatcaaggccttcgggctggaagatcaccaatccaaccgtttcgccgacgtcgcggcgcagaccggggccaagaacatgcacgtggcgcgggtggatgcgcgcttcgatccgaccatttatatcgccatcggcgcctctaacctgttggctatcggcggcggcagctggatggtagtgaacggttcgctgacgctcgggcaactgaccagctttgtgatgtacctcggcctgatgatctggccaatgctggcgctggcctggatgttcaatatcgtcgagcgcggcagcgcggcctacagccgcatccgcagcctgctcgacgaggcgccggcggtgcaggatggcccgcaggcgttgccggccgggcgcggcgtgctggaggtggatatccgcgcgttccactacccggaaaacccgcatccggcgctgcacgatgtggcgctgacgctgaaaccagggcaaatgctggggctgtgcgggccgaccggggccggcaaatcgacgctgctgtcgctgatccagcgccagttcgacgtcgatcaagggcagatccgctatcacggcctgccgttgccgcaggtcaaactcgacgactggcgttcgcggctgtcggtggtgagccaaacgccgttcctgttctccgataccgtggcgaacaacatcgcgctgggccagccgggggcgacgcaggcgcagattgaacaggcggcgcggctggccagcgtccatgaggacattctgcggctgccgcagggctatgacaccgaggtgggcgaacgcggcgtgatgctgtcgggcgggcagaaacagcgcatctccatcgcgcgcgcgctgctgctggatgcggagatcctgatcctcgacgatgcgctatcggcggtggatggccgtaccgaacaccagatcctgcacaacctgcgtagctgggggcaagatcgcacggtgatcatcagcgcacaccggctgtcggcattaaccgaggccagcgaaatcctggtgatgcagcacggcggcgtggcgcagcgcggcgatccggcggcgctggcggcgcagccgggctggtatcgcgatatgtaccgctatcagcagctggaagcggcgctggacgaagcgccggaaaacggcgaggaggcgttggccgatgaataaagtgcaaaagctgtggccgacgctgaagcgcctgctggcctacggttcgccgtaccgcaaaccgctgggggtggcggtgctgatgctgtgggtggcggcggcggcggaagtcgccgggccgatcctggtgagctattttatcgataattacgtcgccaaagggcaactgccgctgatgatcgtcggcgggctggcggcggcctacattctgctggagctgctggcggcggcgctgcactacttccaggcgctgctgttcaaccaggcggcggtaggcgtggtgcagcggctgcgcaccgacgtgatggacgccgcgctgcgccagccgctcagcgccttcgacacgcaaccggtcgggcaattgatctcgcgcgtcaccaacgacaccgaagtgatcaaggacctgtacgtgatggtggtctccacggtgctgaaaagcgccgcgctgatcggcgccatgctggtggcgatgttcagcctcgactggcgcatggcgctggtggctatctgcatcttcccggcggtgttcgtggtgatgggcatctatcaatattacagcacgccgattgtgcgccgggtgcgcagttatctggcggacatcaacgacggcttcaacgaagtgatcaacggcatgggcgtgatccagcaattccgccagcaggtgcgcttcggcgagcgcatgagcgccgccagccagtcgcactatctcgcgcgcatgcagacgctgcggctcgacggtttcctgctgcggccgctgctcagcctgttttcggcgctggtgctgtgcggtttgctgatgttgttcggcttcagcggtgaaggcgtgattggcgtcggcgtactctatgccttcatcaactacctggggcgtttgaacgaaccgttgatcgagctgacgtcacaacagtcgatcctgcagcaggcggtggtggccggcgaacgcattttcgaactgatggatcgcagccagcagagttacggtaccgacgatagtccgttggccggcggccgcatcgacatcaccgatctgagcttcgcttaccgcgcggacaaaaaggtgctgcagcatatttctctgtcggtgccgtcgcgcggcttcgtggcgctggtcgggcacaccggcagcggcaagagcaccttggccaacctgctgatgggttattacccggtcagcgagggagaagtgcgtctcgatggccgcccgatctccagcttgtcgcaccgcacgctgcgccagggcgtggcgatggtgcagcaggatccggtggtgatcgccgattcggtgctggccaacgtcacgttggggcgcaatatcgaggaagacgccgtttggcgagcgctggaaacggtgcagctggcggatctggtgcgtggcttcccgcagggtattcacacccgactgggggagcagggcaataacctgtcggttgggcagaaacagctgctggcgatggcgcgggtcttggtgcaggcgccgcagatcctgatcctcgacgaggcgaccgccaatatcgactcgggcaccgagcaggctatccagcgggcgctgcgcgtgatccgcgagcacaccacgctggtggtgatcgctcaccgcctctcgaccatcgtcgatgccgattccattctggtgctgcatcgcggccaggcggtggagcagggcaaccatcagcagctgctggcgcagcaggggcgctactaccagatgtatcagctgcagctggcgggcgagcagttggcggaagcggtgcgcgaggagagccaacccgcctgatcccacgggccgcgatcgcggcccttatttttcccaacgcaccacaagcaggcaactccgccaggctacgccccctttctgcactttttcgacgcgacacgcaccaaatcagtgcgcattatttaacccattcaaggtatcggtactgcgccgcgccgcggcggcgcccgcgtgcccgctaatccgctgaatcgccatgcaaaataaaatttggcacagcccttgctacatatgacgcgtaccaggggtgagtttgggcttaattcgtggaggggcaatatgaagctggtgaccgtggtaatcaaaccgttcaagctggaggacgtgcgcgaggccttgtcctccgtgggtattcaggggttgaccgtaaccgaagtgaagggctttggccgccagaaggggcacgccgagctgtatcgcggcgccgaatataacgtcaatttcctgcccaaggtcaaaatcgatatcgccatcgccgacgatcagttggatgaagtggttgatgtgattagcaaagccgcctacacaggcaaaatcggcgacggcaaaattttcgttgccgagttgcaacgtgtgatccgcattcgcaccggcgaaaccgacgaatcggcactgtaaccgcgaactcagttaagtgatggggatggattgataatgaaaagactgttatccatgttgggcctgagttcggtaaccctggttccttctttggccctggccgccccggcggtcgctgataaggccgacaacgcctttatgatgatctgcaccgcgttggtgctgttcatgacgctgccgggcatcgcgctgttttacggtggcttgctgcgcggcaaaaacgtgctgtcgatgctgacgcaggtcaccgtcaccttcgcgctggtctgcgtgctgtgggtgttgtatggctatagcctggcgttcagcgagggcaatgcggtgttcggcgggttcgaaacggcgatgctgaaaggcatcggcatcgacagcgtcaccggcagcatcagccaaatgatccacgtcgccttccaggcctccttcgcctgtatcaccgtggcgctggtggtgggtggcttcgccgaacgcattcgcttctcggcggtgctgatcttcgcgatcctctggttcacgctgtcttatctgccgatcgcgcacatggtgtggggcggcggttacctggccgccgacggcgccttggacttcgccggcggcaccgtggtgcacatcaacgccgccagcgccgggttgatcggcgcctacctgattggcaagcgcgccggcttcggtaaagaggccttcaaaccgcacaacctgccgatggtgtttaccggggcgtccatcctgtatatcggctggttcggcttcaatgccggttccgccagcgcggccaacggcattgcggctctggcattcctcaacaccgtggttgccactgcgggcgccattctctcctggaccttcgccgagtgggtgctgcgcggcaagccttcattgctgggcgcctgctccggcatgatcgccgggctggtagcagtgacgccggcggcgggcaccgtgggcgtgggcggggcgttgatcatcggtctggtgggcggcgtcgccggcctgtggggcgtcgtgacgctgaaaaaatggctgaaagtggacgacacctgcgacgtgttcggtgtgcacggggtgtgcggcatcgtcggctgcctgttgaccggggtgttcaccgcctcttcactgggcggcaccggttacgccgaaggggtgacgatgggccatcaggtctggatccaactggtgagcgtgctgatcacgctggtgtggtcgagcgtcgccgcctttatcgccttcaagatcgcgggcgccatggttggattgagagtgccggaggagcaggaacgcgaggggctggacgtcaacagccacggcgagagcgcctacaaccagtaaggctcaaagcagggcagtgcgctaaagactaaaataatgatgaagccaaaaggggcgatggaaacatcgcccctttctttatactgcggatcaggcgtcgcgttggcgaatcaccccttcctgcacggtggtggcgaccagtacgccgtcgcgggtataaatctggccgcgtacaaagccccgtgcgccggaggcagaggagctctccaccgcgtacagcagccagtcatccatgcggaacggacggtggaaccacattgagtggtcaatggtagccacctgcatgcccggctcgaggaagccgacgccgtgcggctgcagcgccgtcggcaggaagttaaagtccgacgcgtagcccagcagatattggtggatgcgctgatcgtccggcatgctgccgttggcgcggaaccacacgtagcgatgcggttcttccacgctgcctttcagcgggttatggaatttcaccgggcgcatttcgatcggcttctggccgataaatttttcgcgcactttttccggcagcatatgcgccagcttctgggcgatctctgactcagacagcagcccttccggcggcggcacgtccggcatctggttctggtgctcgaaaccttcttccgggctctggaaggaggcggtcatatagaagataggtttgccgtgctggatggcgctgacgcgacgggcgctgaagctgttgccgtcgcgcagggtttccacgtcgtaaacgataggcttgctgctgtcgcccgggcgcaggaagtaactgtggaacgaatgcacgctgcgttcgtccggcaccgtctgtttggcggcgtacaacgcctggccgaccacctgcccgccgaacacctggcgcagccccagatcttcactctgaccgcggaacaacccttcttcgattttctccagatccagcagatcgaggaggttttgcaatgcctggctcataaagttgttacctttctaataatcattttgcgcagtgtgcggaatatcacggcgcggcgtcaacattttgcgttaaggggccgatgagaatgctcttaatcatggacgccttgggctgtttaagtgattaataggcggggtaaagtggatttatcagtgttttgtgctaggtttaataggtgaggtggtgaaagccaccaacatgttgataataaaaaaggagaccgatccatgaaactctggcaaatcgtaggcggtgccgcggcactgacgatcacgctggcaggatgcgcgcaaaagagtgccgatgtgcctacacagacggccggtaacccggcggctgcgcaaacgcagattcagggcccggcggtgacaggttcggttaatatacgtcagcgcattgcgctgccgccggacgccgtactgacggtcaccctctctgacgcttcgctggcagatgcgccgtccaaagtgattgcacagcgcgcggtgcgtactgaaggacagcaggcgccattcagctttacgctgccgtacaacccgtccgacatccaaccgaatgcgcgcatcattctgagcgcagcggtgacggtcaacgggcgcctgatgttcattaccgacaccatccaggaagtggttaaccgcaacggcacccgcgccgatctgctgctggttccggtgcagggcgtgccgatgcaggctgcgccaaccgccatgcagtaaacttactgcggtacagcaagatgaaatcaacagcctttgcgcttcggccaaaggctgttttgttttaccagcgccagccgtagcgttcgaaatcgaccgtgctgtgcgggccgaaaattatcccctccgctagcagtgcctgccgttgccgttgaaaatcctccccctgctgcgagatctgtccgtggcggttgatcacccggtgccagggcagcgtgctgccttccggcaaacgccgcagcacgccgccaacctgacgcgcggcgcgcggcgagccggccagccgggcgacttcaccgtaagtggtgactttgccgtaaggaatggcggccacgatatggaaaacccgctggctgaaagaggcgtcttctggttgcatattgctgttcctgcgcgaatcaaaatccaggcgaagagtgtgccacaatgcaggtgggcaagaaaacagcggttggccccggttggcttgctatttggtggggcatcgccgataatgcccaccgcttcggagtacagaagccgtcaatgggggccctgttggttctcccgcaacactaacttgtgaactcggtcaggtccggaaggaagcagccgcagcaggtgacgtgtgtgccgggatgtagctggcagggtccccacccatttgggcttcgccaatccgcgcttttgccacctctcctccacgtatctattatccatttctgtcatcaggcagagcgacacgcatttcttttcttcccgccttcaattcttttggataatgaattagcggttctggggagcgggcacagtgaggcgggcgatgagataacctgtctcgattaaaaaagaaaattgtttccgcgcaatattattatcggaagagggaacgcaagtgaagttttactgtcaataggaaaagtacgtattcaacttgaacattgaagccgataaaagcatcggctcaacgcgttgggggctgattatctgacatatttccaaacggaggtggggattttgtcatacagtttgttcatggtgagctctgccagacgatgatctgccgctgagtaaaacagctccagttcatcatcggaaagctcgtacttatttttctcaataacacgttcgagagtatcaatcgtggtgcatttacgtaaacgcatcagatagtcggttttagtcatggtggcctttagtttaataaccgtaaaatagcttgggaataattatcccctaagttttcattgtcgtacagatgtcctctcctgagaacattctgaataatctcgccttggttttttgccagcggcgcaggtcggaatcattgataccatagctgctgaacagcgtataggtatcgtcgagatattcttcgactaactccgacaggtcagattcgtccatgtatttaattttataactcatcacaaacgaagcgatatgttcgatcaactcattaagctgcaggttgacggaggacgtcggatcgttgacccacccatgatgactgtctcccagggtagcgataccttcatcatacaaattttcgcacaagaatttgagctgagcaatgtcgtgtcgcttaggcgaatactcatccatatcatcccctccgtaagtcttaattgcggtgtgataacactatgtgagtaagctgatttacatcatgaacggaggcagcttaacggtggttaaataaacttcccgtaaaatgaatataaatcattttttcgcgtttggcctgtagttattacttaaacttacaattcatccgcagttgatggtcgtgagttatcaatgatgtcgaagattaaaccccgcgccgtcactcgaaaccggacgctgtcgttgatgatatcttcgctgttgatatccaggcaggcattaaaaatgccccacttataacgataactcattgaataatcgctgtcaccttgttgcactatatcaagtatttctaatgaatcttcggcatagcgtgcgctttcagaataaaagctgagtccgctggtcagcgccggcactaactccgcaatattgtcatgaaccactttctttaattttttaacagaaagtgcgttgacgtccaggttacaggcaagggtaacaagcattaatctcggccaacaacaatgttatctgcttatcttactccttttccgccctcgtcggtaaatttttcgatttaccgctgttctttaccttacgccaacattccaaccgaatggaaatatccctgggttttgtaagggggcggggggagatccgctgtgcgagggattgttacgttccgttgcattattgtcgcgccatagcttgagctacggcagttgttgtgatgttatattataactattatccatcattttggtcatcacattgattcccacttcacgacatggcgccgcgtcgtcactgaattcgttgttcaccacctccgccgccgcgcgttgtgcgggggccgttgtgctgctggctctgctgtggctcggcatcttttgggcggtatcgctgccatgatcatcctgcgtcagctgatgctaggctatggcgccacgccgcttttcccgccgctgagcgggcagtttaccgccggctcgttaaccgcggtggtgggcgtcaatggggccggaaaatcgacattgctgaaaacgctcgccggtttgttgccgccgatgggcggcagcctgaatttcagtggcggaaagccgccgcgcagagcttacttaccgcagcaggcggagctggatcggcagttcccgatcgcggtaagcgatctggtggcgatgggatgttggccgcaaagcggcatgttcggcggtatgaaccagcatgcggcgagccaggttaatgaggcgctggcgagcgtcggcatgagtgtgctggcgcacagcccggtgggcgagctctccggcggccagctgcagcgggtgttgtttgcgcgcctgctggtccaacaggcgccgctgatcctgctggatgaaccttttaccggcatcgacagcgccaccacgcaaattttgctgcaggtgattgcgcagctgcaccggcaggggagaacggtgatcgccgtgctgcacgatatgtcgatggttgccgagcattttccgcaggcgctgttgctgacgccgcaggcttgccactggggcgcggccgagcgggtgctggagcaggtgccgaggtatcacgccgccgaacggcagccggatctgcgggcggtggtgccatgatgctgtggcatgcgcttatcgatcctttcctctctttcggttttatgcgccgcgcgctcatggcgtgcctggcgttgtcgctcagcgccgccccgctgggcgtgtttctgctgctgcgccgcatgagtctggtaggggatgcattgtcccacgcggtgttgcccggcgcggcgatcggctatctgatgtccggcatgtcgctggtggcgatgggcgtgggtggctttatcgccgggctggcggtagcgatgctgtccggcctggtgagccgccgcacgccgctgaaagaggacgccagcttcgccggattctatctgggctcactggcgctgggggtcacgctggtctcgttgcgtggttccagcgtggatctgctgcacgtgttgttcggttcgatcctggcggtggatgcgcaggcgatgctgatggtcggtgctatcgcctcggtttcgctgctggcgctggcggcgctgtaccgcgcgctggttatcgaatccttcgacgtcactttcctgcgcgttaacgcgccgcgccggttggcgctgatccacggcctgtttttggcgctggtggtggtcaatctggtggcgggattccagatcctcggcaccctgatgtcggttgggttaatgatgttgcccgccgccagcgcgcgcttctgggcacgcaatctgccgcagacgctggcgacggcgatgggcatcggcgcgctttccagtctgattgggctggtgtggtcctatcacgcttcgcttcccgccggcccggcgatcgtgctcagcgccagcatcctcttttttgtctcgatcctgtttggaacgcgcggaggcatttacgcctttgcgcgccgttgagaagtgccatttgcaaggagaaaatatgaaacgtttacctatatcgctggcggtagctgctctgctggccagcccattggcgatggcgaagaccgtcgacgccgtcgccagcttttccattttaggggatatcgtcaagcaggtggggggcgatcacgtcaaggtcagcacgctggtggggccggatggcgatccgcacagcttcgagccttcgccgcaggacggcaaaaagctggcgcaggccgatgtggtgttcgtcagcggcctggggctggaaggatggatcgatcgtctggtcggggcatcgggctataaagggcaggtgatcaccgcttcacagggcatcaatacccgccagatggaggaggacggcaaaccgattaccgatccccatgcctggaacagcatgaaaaacggcgtgcagtacgccaccaatgtgatgaacgccctgattgccgccgatcccgaggacgccaactatttccgccagcgcggcgcggaatacattcagcagctgcaaaagctggacctgtgggccaaaaaccagttcgccgcagtgccgccgcagaaacgcaaggtgctgaccagccatgatgcctttggctactttggacaagagtatggcgtcaccttcctcgccccggtcggattttccaccgaagcggaagccagtgccagcgacgtggcgagcctgattaagcagattaaacaggagaaggttaacgcttactttatcgaaaaccagaccgatccgcggctggtgaagcagattgccgccgccaccggcgccaaggcgggcggcgagcagtaccctgaagcgctctcccgcgccggtggtccggcggccacctatgagcaggcgttcaaacacaatgtcgacacgttgctgagcagcatgaagtaatctctgccccccgcccgcgggtgggggacagcttgcaggcactttctcgccataaaaaaagccccgttgagcagcaacggggctttgcgacagatgacacttgggagttaacgctttttcttacgtccctgtaccgctttgaatcgcggattgcttttacagatcacatagatgcggccacgacgacgcacgactttgcaatccggatggcgatttttcgccgaacgcaatgaactcaatacctgcatggggtttccttgttacttattgccgataaagcggccaaagcgctgctggaagcgcgccgtgctgccttctttggaatagtctttctgcttaccggtgtaatacggatgcgaagcggaagagacgtcgagggtgacatacggccagctttcgccgtccagttcgatagtgcgatcggttttgatggtcgatcccactttgaagtaggcattggcgctgacgtcgtggaacaccacggtgcgataatcgggatggatgccgggtttcataatggctctctctctcgtgtaatgttatactataacaataattatgcgccgacctggcatcatgatcaagcgtaaattgcactcacgagcgaattaatgagaacggtttgcattaatctgctgaaacaaaagaaaaaggccgcatgcgcggccttttcgattatcgggtggagctcacatcactgagcgatcagtggtgctctaccgggtggctgtgttccaggtcttcgttcttcttgctgaagcggcggcgaaccaccacgaagaacaccggtacgaagaagatcgccaatacggtcgcggtgatcatcccgcccattacgccggtacctaccgcgttctgtgcgccggagcctgcgccgctgctgataaccagcggcagaaccccgaggatgaaggccagggacgtcatcaggattggacgcagacgcatacgcactgcttccaatgtcgcctcgatcaggcctttgccttctttttccatcaggtctttggcgaattccacgatcaggatggcgttcttcgccgatagaccaatggtggtcagcaaccctacctggaagtacacgtcgttgttcatgccgcgcatcgtcgcggccaacaacgcaccgataacccccagcggcaataccagcatgaccgagaacggcacggaccagctttcatacagcgccgccagacacaagaacaccaccagaatcgagatggcgtacagcgccggcgcctggttgcccgacagacgttcctgataggacatgccggtccagtcgtaaccgatgccgcttggcagtttggacgccagttgctccatcaggttcatcgcttcaccggtactcttgcccggtgcggcctggcccagaatttccatcgacggcaagccgttatagcgttccagacgcggtgagccgtattcccatttcgccgaagagaaggcggagaatggcaccatctggccgctggtaccgcgcacataccacttgttgatgtcttccggcagcatgcggaacggcgcttcggcctgtacgtacaccttcttcacacgaccgcggtcgatgaagtcgttgacgtacgagccacccagcgcggtgctcagcgtgctgttaatggtggtgatgctcacgcccaacgccttggctttctcctgatcgacgatcagtttgaactgcggcgtatcttccaggccgttcgggcgcacgcccaccagcacatccggatgctgagcaaccatgcccaacagctggttacgcgcttcggtcagtttttcgtgccccaggccgccctggtcaatcagctcgaagtcgaagccggttgcggtaccgagttcgataatcgccggcaggttgaacgggaacaccaggccttctttaatctgcgagaaggcgcccatggcgcgaccggcgatcgcttcgaccttgttcccggcccccggacgctcgccccagtctttcaggctgacgaatgccaggccgttgttctggccgttaccgttgaagccgaagcccgcgacggtaaacaccgaaaccacgttgtccttttccttgttcaggaagtagtcagagacttcttccagcactttgttggtgcgggactcggtggcgccggcaggcaactgcaccatggtcaacaggatgccctgatcttcgtccggcaggaacgaggaaggcaggcgcaggaacagcaggcccatgccaaccacgatcagcaggtagatgatcagatagcggccggtgctgcgcaggatgttgcccacgctgtcggtatagtgatgcgtgcttttctcgaacatgcggttaaaccagccgaagaagcctgttttaaccccgtgatcgcctttcgggatcggtttgagcatggtggcgcacagcgccggcgtcaggatcaaggccaccagcaccgacagcgccatcgcggacacgatggtgatcgagaactggcgatagatggcgccggttgagccgccaaagaacgccatcggcacgaataccgctgacagcaccatggcgatgcccaccagcgcgccctggatctggcccatcgatttacgggtggcttctttcggcggcagcccctcttcggacatgacgcgctcgacgttttccaccaccacgatggcgtcatctaccagcaggccgatcgccaacaccatgccgaacatcgtcagggtgtttatcgagaagccgaacgccgcgagtatcgcaaaggtccccaacagtactaccggcaccgcgatggttgggatcagcgtcgcgcggaagttctgcaggaacagatacatcaccaggaacaccaggatgatggcttcgatcagcgttttcaccacttcgttgatggagattttaacgaacggggtggtgtcgtacggataaaccactttcatcccttgcgggaagaatggcgccatcttggccagctcgtctttcacacctttggcggtgttcaaggcgttggcgccggttgccagtttgatacccaggccggcggcaggcttgccgttataacgtgcggtaacggcataactttccgcgccgcgctcgatgtgagcgacgtcgcgcaggcgcacctgggaaccgtcggtattcaccttcagcaggatcttgccgaactcttccggcgaagtcagacgggtctgcgcgatgatcgaggcgttcaactgctgccccggcaccggcggcaggccgcccagctggccagcggcgatctggttgttctgctcggtgatggcggaggtcacgtccgtggtcgtcagctggtagttgttcagcttgttcggatccagccagatacgcatcgcgtactgggcaccgaacagctgcacttcacccacgccggacgaacggctgatcggatccttgatgttggacgccacgtagtccgcaatatcgtcctgcgtcatgttcggatcgtcggaaacgaagccggccaccatcaggaagctgctgctggatttttctactttcaggccctgttgctgaacttcttgcggcagcagcggggtggccaacgacagtttgttctgaacctgaacctgcgcgatgtcaggatcggtgccggattcaaacgtcagggtaatggtgacgctaccagaggaatcactggtggaggacatgtacatcaggttatcgataccgttcatgttctgttcgataatctgtgtgacggtatcctgcaccgttttggcatctgcgcccgggtagttggcggaaatactcaccgccggcggtgcaatagtgggatactgcgcgatgggcagtttcattattgcaagcacccccgccaacatgacgatgatggcgattacccaggcgaaaattgggcggtctataaagaacttagccatgtattacaggctcctttttatgacttctgcgcttcagactgcggctgtttttgcgcctgagtgtcaacttcctgcacttttacctgcgcgcccggatgcactttcatcaggccggagacgatcacgcgatcgccggctttcaggccatcggtaaccagccatttgtcgccaatcgcctggtccgccttcagcgtgcgcagctcaactttgttgtctgcccctaccaccaacgccgtcgcgtcgccgcgcgggttgcgggtgacgccctgttgaggcaccagcaacgcatcgctgcgtacgccttcgtccagacgggcgcgcacgaacatgccaggcaacagcgtatcgttcgggttagggaacagggcgcgaatggtaatggagccggtggtctcatcgacggtgacgtcagagaattccagcgtgccttcctgcgcatattcggtgccgttttccagcatcagtttcaccttggccttgccgttttcctgcttcagcgcgccgctggccagttcttgcttcaggcgcaggaagtcggtgctcgactgggtgacgtcgacatacatcggatccagctgctgcacggtggacagggcggtcgcctggccgttgctgaccagcgcgccttcggtcacggcagatttgccgatgcggccggagatcggggaggtcactttggtgtacgccagattaatgcgcgcggtttccacggcggccttggcggccaccacggcggcatccgcttgctgcagtgtggagacggcgttgtcgtagtcctgcttactgatatagctggtacccagcaatggcttgtagcggtttaccgtcacgcgtgcgatggaagcgctggcctgtgctttggccaaatcgcctttcgcgctgtcgtagctggcttgataggttgcgggatcgatttggtacagagacgtcccggccttgatatcgctgccttcgacgaagttgcgcttcaggatgatgccactgacctgagggcgaacttcggcgatacgatacgcagcggtgcggccaggaagatcggtagtgatgttgagaggctcggccttcaaggtgactacgcccacttcaggtgcctgttgttgggcaccttgctgttgggtttctttatcgttacatcctgttagcactaagctgcctgaaagcatcagaacggccgccagaggcgttaaccctctgtttttgttcatagaaaaacctcaagtgtccgatttcaaaatgatcaatggatcacaagctttaaaacccattgctgcgttaattatatgtgcgtgctatggtacatacattcgcgaatgtatgtaaatcacactccccctaaataacaatgccatggcacgaaaaaccaaacagcaggcgcaagaaacccgacagcaaatcctcgatgctgcggtgagagagttctctgaacgtggcgttgctgcaacgtcactgacagatattgccaccgctgctggggttacgcgtggagccatttactggcacttcaagaataaggtagacctgtttaatgaagtttgggaatctaccgagccgaaaattgaccagctcgaaacagagtatcaggcaaagtttcccgataatccactgcgggttatccgggaaattctgatttacgttctgacgtctacggttgaagacggccgcaggcgggcgttgatggaaattatattccacaaatgcgagtttgtcggtgaaatgatgccgctgctggattcgcgcaaggtgctgtacctcgccggttacgaacgcatcgaagcggtgctgtacaactgcattcaccacgggcaattgccggccgatctgcacactcgtcgcgcggcgatcatcctgcgcggttatatcaccggcctgctggaaaactggctgtttatgccggaaagtttcgatttgcgggccgaagccgaagcgctggtggatgcgtttttggagatgctgcagttttgccccaccttgcgcctcagatccgatatgccgacggcagcaccgcccaacgccggctccctgcctttataaggagagatttcatgtcatcagtcgttctcatcgccaatggcgccgcctatggccacgaatccttgttcaatgcgctgcggttggccatcgccatgaaagagcagcagagcagtctcgatctgcggctgtttctgatgtccgatgcggtggtggccgggttggccgggcagcagccgcacgaggggtaccacctgcagcagatgctggaaatcctcaccgcgcagcaggtgccggtcaagctgtgcaagacctgcgccgacgcgcgcggcgtcagccgcttgccgctggcggacggcgtggcgatcggcacgctggtcgagctggcgcagtggacgctggcggcggagaaagtgctgactttctgatttcgcgacaatgggacatcaccggcaacgcttttgttgttcgttgcctgccggctgtcgtgataatcttcaggcttcttaaccgattccgaagctaaatcatgcatcgctggttgactctgccctctctggcgccgcgctcgtttgtcggcgcatgccggcggcgcatcgccgccgcgacacttcttttcctgatttgcgcgctgagcttgccgacacaggcggcgctgaacggcgatctgccgcagcgcagcgaagtgcaaagccagctggaaacgctgagcaagcaaaaagccctgacgccggtcgaaaagctgtcccaacaggatttaacccgcacgctggagctgctggacgccctcgagcgcaaccggcaagacgccgcgcagcttaaacagcaggtgcagcaggcgccggcgaagctcaatcaggtcactgccgaactggatgcgctgaagcagccggtggacaatgcggcggcgcgcgctgcgctgttgccgttgtcgctgcgccagttggaaagccggctgtatcaaacgctcgacgagctgcaaagcgcgcaggagagcctctccacctacaacagccaactggtgtcgctgcaaacccagcccgagcgggtacaaagcaccatgtacgccgcctcgcagcgcctgcaggagatccgcagccagctcagcggccagacgccggggcaagattcgctgcgcaacagtcaacaggtgatgctgagcaccgagcaggcgctgctcaatgcgcagctggagctgcagcgcaagagcctggaagccaataccacgctgcaggatctgctgcaaaagcagcgcgactacaccacggcgcatatcgacgcgctggataagtcagtgcagttgctgcaggagatcgtcaacagcaagcggttgacgctgtctgaaaagaccgccaaagaggcgcagaacccggaagacgccaccgatatccagcacgatcagctggtcagcaagcagctggacgtcaaccgccagctgagccagcggctgattgccgccaccgaagagagcaacaccctgttccagcagaatattcgggtcaaaaactggctcgatcgcgggctgcaggcggagcgtaacctgaaagagcagatccaggtgctgaagggcagcctggtgctgtcgcgcatcctgtatcagcagcagcagagcctgccgcagggcacgctgttggcggatatggacacgcgcatcgccgatttgcggctggagcagttcgatatcaatcagcaacgcgacgatctgttcaagggggaggattacatcaaccagctggtggccgaaagcaaggaaaaggccggcccggaagtgatcgacgcgttgaacgagatcgtcgacatgcgccgcgagctgttggatcagctgaacaaacagctcagcaaccagctgtcgctgtcgatcaacctgcagatcaatcagcagcagctgaccagcgtctacggttcgttgcaggatacgctgacccagcagatcttctgggtcaacagcaacaagccggtcgatctggcgtggctgaaggcgatgccagaggcggtgcgcgatcagcttgccgggctagatatcaaattcgacggcggcaagctggtgcagggcgggttgaatgcgctggtgttcctgatcccgatgctgttggcgatcggggtattgcgctggcgctaccggctgatcgacggccatttacaaaagctggccagcgatgtggggcaactgaagcgcgacggccaactgcatacgccgaaggctatcgcgctgaccttgctgaaggtattgcccggcgccgcgctgctgctcggcgtcggtttctggatgtatcgcgccgatttcggcatcagcgactttatctgggcattgtcgcagcagctggcgctgtcgtggctggtgttcggcttcagctatcggatgctgaaaccgggcggcattgccgagcggcatttcaacttcggcgccaatctgtgcgcgcattaccgccggcagacgctgcggctgggattggcgctgcagccgctgatcttctggtcggtattgggcgaaaaagcgccgctgcgcctggtggaagacgttatcggccagatcgtggtgatgctgacgctggcgctgctcgcggtgctggtgttcccgctgtgtcgcgacagctggcgcgaaaagggctcgcacgccgtgcggctgatggtggttactgccatagccgccacgccgctgatcctgctggggctgatgttcgccggttacttctataccacgctgcgactggccagccgctggatagacagcctgtatctgtttttcctgtggaatatcgtgtacctgaccgcgctgcgtggcctgagcgtggcggcgcggcgtctggcctaccggcgcgcgttggcgcggcggcaaaacgtggcgaaagaaggagccgaaggcggtgaaccggtggtggaagagccgccgctggcgctcgatcagatcaaccagcagtcgctgcgcctgaccaccctggtgctgttcgccatcttcgccagcgccttctatgccatttggtcggatctggtgacggtcatcgcttatctggacagcatcacgctgtggcattacaccagtaccgtggcgggcagcagcgtgtcgcaggcggtgacgctgggcaacatgatggtggcgatcgccgcagtgatcgtcgcctacgtgctcacccgcaacttgcctggtctgctggaggtggtggtgctgtcgcggctgcagctgcggcagggggcgtcttacgccatcaccaccgtgctcacttacctgattaccgccgtgggcgccgtggttgcgctgggatcgctcggcgtctcctgggacaaactgcaatggctggccgccggtctgacggtcgggctgggcttcgggttgcaggagatcttcgccaacttcgtctccggcctgatcattctgttcgaacgcccgatccgcatcggcgataccatcaccatcggcaccttctccggttcggtcagcaagatccgcattcgcgccaccaccattaccgacttcgatcgcaaagaggtgatcattccgaacaaggcgttcgtcactgagcggctgatcaactggtcgctgtccgacaccatcactcgcgtgctgatcaaggtcggcgtggcctacggctccgatctcgacaaggtgaaaaaggtgctgctgcaggcggcgcacgacaacccgcgggtgatgaccgatcccgaaccgcaggtgtttttcctcaacttcggcgccagcacgctggatcacgaactgcggctctatgtgcgcgaactgcgcgatcgcagctacacggtggacgaactgaatcgctcaatcgaccgcttgtgccgggaaaacggcatcgacatcgccttcaaccagctggaggtgtatctgcataaccagcagggcaacgaagtgcaggaagtgaaaagaacgctgtcgccggacgacggcggccagacggcgggctgatgaacgttgaaggacgaaagggacagcggcgctgtccccgattactgtccggcgggcagatagggcgaggtgacgccggcgcgctgcagcttttcctgataatcccgtttgacgatatccagcgccgccagtgcggtgaccggatcgatctcgttgcattccagcaggtaaatcaagtctaccgccagctgcagttcgggtgaggcgttttccagagacatagcacctgcgcttattaattaatgggatgaataactcgcgtaccggcagagtatagtgaacccggcgcgcaaccgggaataatcattaaaatattgtgataaatcttcaaaaaccgttttctttgcgctcgatattgcgctcgatgcgcgccaacgcctgacgacagcgcatcagccgcccctccagcgccgccagctcgtgctgcagtttttgctgcgccgccagcgtggtttggcggccgagcaggctttcccgatcctgaatcatggcgatcagccggcgttcgtagtcctgatgttcggccagcttgtggtacagatcggcctcgggggcttctttcggctggttcttgcgccgcagcgcctgggtcgccagctcgcgctgcagggcggcgatctgagccaccagtttttcggccagaaaggccacctggctggtgcggttgtcgttggcggcgctttgcagctgggcgaaattcttctccacctcggccaggtagtcgcgcagccgcgtgccgcgattggcgaacagggcggcgtcgaagcgcgcctgcgggatcggaacgtcgccgcgcggggtcacttcggccgccagcgccgcgatctgctgtgccaacacctgtaatagacgctgagtgctcacataagctccctcttgatttcaacaggcgtaagcttgcccgcgatgctgctgtgaaacaagcgccgcatgcatattccgccggcgcggcgccgatgctacagtaagccgcaaccggttgaggagcgaagagccgcatgacgcgtgggttattgatcattttgggctggctggcggtggtgctggcgacgttgggcgtggtgctgccgctgctgccgaccacgccgttcctactgttggccgcctggtgtttcgcccgctcttcgccgcgctttcatcactggctgctgcaccgttcctggttcggcccttacctgcgccactggcagcagcatcgcgcgctgccgccgggggcgaagtggaaggcggtgctggtgatcgtgctgaccttcgcctgttcgctgtggctggtgaaaatctggtgggtgcgcgggctgttgctgctgatgctggccattttgctgacttttatgctgcgtctgccggttattgacctgccgcaacaaaaacagcgctgattgtgcgccgctggttgcatttgtccgccagtttgcatagatttgggcgttttcgtgcgcggatcgcctgccatttcttctccggtgtgtttctcccgggggcggcgggtgagcggcgcgccggttttcaggcagttttatcaggcaacaattatgaccgctactgcgcagcagcttcagtttattaaagacagtatcaaaaccatcccggattatccgaagccgggcatcctgttccgcgacgtgaccagcctgctggaaaacccgttggcctatgccgccagcatcgagctgctggttgagcgctatcgcgaagcgggcgtgaccaaggtggtgggtaccgaagcgcgtggtttcctgttcggcgcgcccgtcgcgctggcgctgggcgtcggtttcgtgccggtgcgcaaaccgggcaaactgccgcgcgccacgctcagcgaaagctatgagctggagtacggcaccgacaagctggagatccacaccgatgccatcaccgcgggtgacaaagtgctggtggtggacgatctgctggcgaccggcggcaccatcgaagcgaccaccaaactgatccgccgcctgggcggtgaagtgaacgatgccgcgttcatcatcaacctgccggatctgggcggggaagcgcgtctgaacaagctgggcatcgattgctactgcctggtggatttcgccggtcattgatgcggcatcgcccctcgggcacaacggcctcgcggatcgccgcggggctgtgttagcatgaccctccagattcctcgacttctccggtattaatgagctatcaggttctcgcccgtaagtggcgccctcaaacgttcgcagacgtggtcggccaggaacatgtcctgaccgcgctggccaacggcctctcactggggcggatccatcacgcctatctgttctcgggcacgcgcggcgtgggaaaaaccaccatcgcccgcttgctggccaaaggcctgaactgtgaaaccggcatcaccgccacgccatgtggccaatgcgacaactgccgcgagatcgagcaggggcgctttgtcgatctgatcgagatcgacgccgcttcccgaaccaaggtggaagatacccgcgatctgctggacaacgtccagtacgcgccggcgcgcggccgcttcaaggtctacctgatcgacgaagtgcacatgctctcgcgccacagcttcaacgcgttgctgaagacgctggaagagccgccgccgcacgtcaaattcctgttagccaccaccgatccgcaaaagctgccggtgaccattctctcgcgctgtctgcagttccacctcaaagcgctggacgtcgatcagatccgtcagcagctggaaacggtgctgacggcggagcagatcaccagcgacgcccgcgcgctgcagctgctggcgcgcgccgccgatggcagcatgcgcgacgcgctgagcctgaccgatcaggcgatcgccatggggcaggggcaggtgaccgccgctaccgtcagccagatgctcggcacgctcgatgacgagcagccgctggcgatcctcgaagcgctggtcagcgccgacggcgaaaaggtgatggcgcaggtcgcgcaggccgcttcgcgcggcgtggactgggaaaacttgctggtggagacgctggcgctgctgcatcgcattgcgatggtgcagctgttgccttcgatgctcgacaaccaatacgccgccgtggagcaacggctgcgcgagctggcgcgcaccctgccgccggccgatgtgcaactttattaccagacgctgttggtgggccgcaaagagctggcctatgcgccggatcgccgcatgggggttgagatgaccctgctgcgcgcgctggcgtttcacccgaaagcggtgatcccggagccggtggcgttggtgcagaccgcgccggcgccgatggcgcagccgcaggccgccgcatcgccacagccgccgcagtttcaggacgcgccgccgccgctagggcagccggccgcgccgcagcgacaatcatcgactcctttaccggatgccaccgcccagctgttgaaagcgcggtcccagctgcaacggcagcagggagcatccacaccaaaaaagaatgagccggcggcgccaggaatagcgcggccggcaaactcggcgctggggcgtttggcttcggtgaccgagcgcagccagcagcgcctggcggagaagaaggtgccggaaaaaccggcgaaaccggaagcttatcgctggcgcgcgcaaaccgagccggaagcggcgccggaaccgctggcgacgccgaaagcgctgcgcacggcgttggaacatgagaaaacgccggagctggccgccaagctggtggtggagtcgctggagcgcgacgcctgggcggcagaaatcgataagctgaagatcccgaaattggtgcagcagctggcgttgaacgccttcaagcagcagccggagccgggcaaaattaacctccatctgcggtcttcgcagcgccatctgaattcgccttcggcgcagaagacgctggccgacgcgctcggtgagctgtacggcggcccgattgagctgaccgtggtggaggacgataatccggcggggcgcaccccgctggagtggcgacaagccatctatgaagaaaaactggcgcaggcgcgccagtccatcgaagcggataccaacattcagacgctgcgccgattcttcgacgcggatctggatgaagagagtattcgccccctttaaacgccgcgcgaggtgcgcggccctagcgacgagagacgactatgtttggtaaaggcggtctgggcaacctgatgaagcaagcccagcaaatgcaagaaaaaatgcagcagatgcaggaagaagtcgccaaattggaagtgaccggcgaatccggcgcgggcctggtgaaagtcaccatcaacggcgcgcacaactgccgccgcgtggagatcgatcctagcctgatggaagacgacaaagagatgctggaagatctgatcgccgcggcgtttaacgacgccgcgcgccgcatcgaagagactcagaaagagaaaatggcctccgtctccagcggcatgcagttgccgcctggcttcaagatgccgttctgatgcaaaccagcccgctccttgaatccctgatggaggcgctgcgctgcctgccgggcgtcggcccgaaatcggcgcagcgcatggcgtttcaactgctgcagcgcgatcgcagcggcggcatgcgcctggcgcaggcgttgacgcgcgcgatgtcggagattggccactgcgccgactgccgcaccttcaccgaacaggacgtctgcaccatctgcgccaatccgcgccgccagcaaaacggccagatttgcgtggtggaaagcccggcggatatccacgccatcgagcagaccggccagttcgccgggcgctactttgtgctgatggggcatctgtcgccgctggacggcatcgggccgggcgatatcggtctggatcgcctggagcaacggctggaaaaggaaagcatcaccgaagtgatcctcgccaccaacccgactgtggaaggggaggcgaccgccaactacatcgccgagatgtgcggccagtatggcgtgctcgccagccgcatcgcccacggcgtgccggtgggcggcgagctggagatggtcgatggcaccacgctgtcgcattcgctggccgggcgccacgccatcaagttctgatgttttcccggatggggccgcccggccccattgttttttgccaaaaaaatcccgccgtccgcttgaaaaacaacaccctgaccctcatctgatcctcattgttcgattttggtagccattgtcttttgaggtaatcaatgagtatgaaaggtcaagaaacccgcgggttccagtctgaagtaaaacagctgcttcatttgatgatccattcgctgtactccaacaaagaaattttcctgcgcgagctgatttccaacgcctctgacgccgccgacaagctgcgcttccgcgctctgtccgcgccggagctgtatgccggcgacggcgagctgcgcgtacgtttgtccttcgataaagagcagcgcaccctgaccatcgccgacaacggcatcggcatgcgccgcgaagaagtgattgaaaacctcggcaccatcgccaagtcaggcactaaagcgttcctggaatccatcggttccgatcaggcgaaagacagccaactgatcggtcagttcggcgtcggtttctactcggcgttcatcgtcgcggacaaagtgaccgtgcgcacccgcgccgccggcgccgccgatgacgagggcgtgttctgggagtccgccggcgaaggcgactacaccatcgccgacatcaccaaagagacccgcggcaccgaaatcaccctgcatctgcgcgaaggcgaagatgagtacctcgacgcctggcgcctgcgctcggtgatcggcaaatattccgatcacatcgctttgccggtggagatcgaaagcaagaacgaagaagacgataccgtcacctgggagaagatcaacaaggcgcaggccctgtggacccgcagcaaggctgacgtgaccgacgaagagtacaaagagttctacaaacacatcgcccacgacttcaccgatccgctgagctggagccacaaccgggtggagggcaagcaggaatacaccagcctgctgtacatcccggcgcaggcgccgtgggacatgtggaaccgcgatcacaagcatggcctgaagctgtatgtgcagcgcgtgttcatcatggacgacgccgagcagttcatgccgaactacctgcgcttcgtgcgcggcctgatcgactccaacgatctgccgctgaacgtatcgcgcgagatcctgcaagacagccgtgtgacgcaaaacctgcgcggcgcgctgaccaagcgcgtgttgcagatgctggataagctggccaaagacgacgccgaaggctaccagaaattctggcaacagttcggtctggtgctgaaagagggcccggcggaagacaacggtaaccaggaagcgatcgccaaactgctgcgcttcgcctctacccacggtgacagctcggcgcagaccgtatcgctggaagactacgtcggccggatggcggaagggcaggagaagatttactacatcaccgccgacagctacgccgcggccaagagcagcccgcacctggagttgttccgcaagaaaggcatcgaagtgctgctgctgtccgatcgcatcgacgagtggatgatgagctacctgaccgagttcgacggcaagccgttccagtcggtcagcaaggcggatgaagcgctggataaactggcggatgaaaccgaagagcagaaggccgccgagaagcaactggaaccgttcatcgaacgcgtgaaaaccctgctgggcgatcgcgtgaaggatgtgcgcctgacgcaccgcctgaccgatacgccggcgatcgtggtaaccgacgccgacgagatgagcacccagatggccaagctgttcgccgccgccggtcagcaggcgccggaagtgaagtacattttcgagcttaatccggaacatgctctggtcaaacgcgcatccgacgtgggcgataacgaacatttcgccgagtggatcgacctgcttttggatcaggcgctgttggctgaacgcggcacgctggaggatccgaacctgttcatccgccgcatgaacaagttgctgtccgcctgaagttgattatatgcgcccttaacggcaccgttaggggcgcatttccggtttttccccgcattttcccctcttttgttcgcttgaatttttgcacattccgcaatcgatttccttcgcgcgccttgagcctgccccccctgaaatggtatcgttgagcgttttcgcaattttataaaaactacatagcaaggggatttacgcaatgcgtatcattctgctgggcgctccgggcgctggtaaaggtactcaggctcaattcatcatggagaaatacggcattccgcaaatctccaccggtgatatgttgcgcgcagccgtgaaggccggcagtgaactgggcaagcaggcgaaagagatcatggacgccggcaagctggtgaccgatgagctggtgatcgcgctggtcaaagagcgcatcgctcaggaagattgccgcaagggcttcctgctggacggtttcccacgcaccattccgcaggctgacgcgatgaaagaagccggcatcaacgtggacttcgtgctggagttcgacgtgccggatgagctgatcgttgaccgcatcgttggccgccgcgtgcacgcgccatccggccgcgtataccacgtgaaattcaatccgccgcaggtggaaggcaaagacgacgtgaccggcgaagagctgaccacgcgcaaggacgatcaggaagagaccgtgcgcaagcgtctggtggaataccatcagatgaccgcgccgctgatctcttactacagcaaagaagcggcagcgggcaacacccaataccgcaaaatcgacggcacccgcaaggtggccgaagtgagcgcagagctggcgaccatcctcggttgatcgcaagcgcatcgtgcatgacgccgggcccgtggcccggcgtttttttttgccgttttcccgttaaattgtgatcgcggcggcttgttgcaaccgtgcccgttaatcgcccgcgccaaatggcgtataacaagcctgcgttttcaccctcagcagggagccgggcatgctcagacaaaccactcttctggcggaagccaccgcgcgccagatcgtccagcgggcgatgggcatcatcagccattccgtcaacgtgatggacagcaacggcgtgatcatcgcttccggcaatccgcagcgtctgtttcagcgccatgagggcgcggtgctggcgttggcggagaatcgggtggtggagatcgatcgcgccaccgccgagcatctgaaaggggtgcggcctggcatcaacctgccgttcagctttcgtaatcagcgagtgggggtgatcggcatttccggcgagccggccgaggtgcgcgcctacgccgagctggtcaagatggcggcggagatgatggtggagcaggcggcgctgctggatcagcaccagtgggaaaaacgctaccgggaagagctggcgaatcagctgctgcagccgcagccgaacaccgcgtcgctggaggcgatggcggcgtatctggggttggatctgcgccaggcgcgcatcgtctggatcgtcgaactgcaagaggcgcagccgcacctgctgcgcgagctgttggcggagctggaggccacccagcgcgacgcgttgatcgccattaccggcttcaatgaaatgactctgttgcgcccggcctgcatggctcagggcgaatggagtttgaagctggagcgccaacaggcgcagcgtctgcaaaaccagctcaagcaccgctttcgggtacggctgatcgtcggcggtttctacgacgatccgcaaagcgcctaccgctccagcctgaccgcgcgcgccacccaggcgatggcgcagcgcctgaaattgcgtcacgccacgctgttctaccacgactatccgctgccgtcgctgctgtgcgatctcggggaggactggcgcgcgcaagagctggggcgtccctggcgaacgctgggcgaacaggacgaaaaaaacgtgctgcgcagcacgctgcgccactatttttcgcagaattgtgatcagacgcagaccgccgcgcagctgcatattcacgtcaataccctgcgttatcgcctgcagcgcatcgaggcaataaccggcatgaaaatcaatcaattaaccgatgctctgcggttgtatatcggcatgctgatgcacgactgaattgtgccaacccacaaattccgcgccgttcccccggcgattttttgttgttttccctcaggtctgcgccgggcgcgcgcgatatgttggcctgcacatcaaccacggagaaaacaacaatgacaaccgtatccactctgggggcgctggtggcgttagccgtcgccatcgtcctgattctacgcaaggtgccgccggcttacggcatgattgccggcgcgctggcgggcgggctgtgcggcggcgccgatctggtgcagaccgtgacgctgatgatcggtggggcgcagggcatcaccaacgccgtgatgcgcattctggcggcgggggtgctggccggggtgctgatcgaatccggcgcggcgcacaccatcgccgaaaccatcgtgcgcaaggtgggcgaaacccgcgcgctgctggcgctggcggtggctacactgatcctgacggcggtgggggtgtttatcgacgtggcggtgatcaccgtcgcgccgatcgccctgtcgatcgcccagaaggccggcatttcacgcgcggcgatcctgctggcgatgatcggtggcggcaaggccggcaacgtgatgtcgcccaacccgaacaccatcgcggcggcggacaatttccacgtgccgctcacctcggtgatgatggccggcatcgtgccggggctgtgcggcctggtagtggcctatctgctggcgcgccgcctgagcgataaaggcagcaaggtgatggccgaagagctgactcagcatgccgaaggggcgcggccgggcttcgcggcggcgatcagcgcgccgctggtggcgatcctgctgctgtcgctgcggccgatcgccgggatcgccgtcgatccgctgatcgcgttgccggccggcggtttggcgggcgcgctgttgatggggcgcattcgccagtgcaatcagtttatggtctccggcctgtcgcgcatggcgccggtggcgatcatgctgctcggcaccggcacgctggcgggcatcatcgccaactcggcgctgaaggatgtcctgattaacggcttaacgcacaccgggctgccggcctggctgctggcgccgctgtccggcgcgctgatgtcgatggcgaccgcgtcgaccaccgccggcaccgccgtcgcctccggggtgttcagctccacgctgctggaactgggggtgagcgggctagccggcgcggcgatgatccacgcgggcgccacggtgctggatcacctgccgcacggcagcttcttccacgccaccggcggcagcgtcaatatggcggtgcacgagcggctgaagctgctgccgtatgagacgctggtggggttcaccatcgcggcaatctcggcgctgatgtttggcgtatttaacctggcgggataaggaacagtgatgaaaacgctgaaaaaagtggttattgccccggattctttcaaagagagcctgagcgcgctcggcgtcgccgacgccatcgagcggggattccgccaaatctacccgcaggcgcactacgtgaagttgccgatggcggatggcggtgaaggcacggtggagtcgatggtggcggccaccggcggcgagatcgtccaggtgacggtcaccgggccgctgggggagccggtgcagggattctatggcctgctgggcgatggcgaaaccgcggtgattgaaatggccgccgcctccgggctgcatctggcgccgcccggccggcgtgatccgcgcatcaccaccagttacggcaccggcgaactgatgttggcggcgctggaacgcggcgtgaaggcgatcattctcggcatcggcggcagcgccaccaacgacggcggcgccgggatgatgcaggcgctgggcgttaaattgctggataaggatcgtcgcccgctgccggtgggcggcgcggcgctggcgcagctggcgcacctcgatctcgccgggttggacgcgcgctggcaacgggtgagcgtgaccgccgcctgcgacgtcgataacccgctgtgcggcgaaaagggcgcctcggcggtgttcgggccgcagaagggggcgacgccggagatggtggcgcagctcgatgcggcgctgcaccactacggcgagctgctggaacgggaaactggccgcgccgtgctcacccagccgggcgcgggggcggcgggcggcatgggggcggcactgctcggcatgctcagcgcgcgcttgcggccgggcatcgagattgtcactgaaaccctgcgcctggatgaggcggtgcgcgatgccgatctggtgatcaccggcgaagggcggctggacagccagtcgattcacggcaaaacgccgattggcgtggcgcgggtggccaagcgccacggcgtgccggtgatcgccatcgccggcagcctgacgccggattattcggtggtgcatcagcacggcatcgatgcggcgttttcggtgctcgatcgcattgtgacgctggaagaagcgctgacggacgccgatcgcaatctgcaggtgacggcgcgcaacgtggcggcggtatggcagctggcgcagggaagaagcccacaggcatagcctgttgctgttatcggtttcgatgcaggacttttccgttacaatagccggcattaatggctgctgacatcccgacccagaacggaatgccggccggaaaggaaatgaggggaactgagatgaagcaagagaaacacggcgtattgctggtgaacctgggcacgccagatgcgccgacctcgtctgcggtcaaacgctatctgaaggaattcctcagtgacgatcgcgtggtcgatacggcgccgctgatctggtggccgatcctcaacggcgcgatcctgccgatccgctcgccgcgcgtggcgaaactctatcagtcggtgtggatggaagagggctcgccactgctggtgtacagccgccgccaacagcgggcgctggcggcgcgcatgccgaatacgccggtggagctgggcatgagctacggttcgccaagcctggcggaagccatcgacaagctgctggcgcagggcgtgactaacctggtggtgttgccgctctatccgcaatattcctgttccaccagcgcggcggtatgggatggcgtggcgcgggtgctgaaaggctatcgccgcttgccttctgtggccttcattcgcgattacgccgaacacccggcctatatcgccgcgctgcagcaaagcgtggagcgctcgttcgccgagcacggccagccggaccggctggtgttgtcgttccacggcatccccaagcgctatgcgcggctcggcgacgactacccgcagcgctgcgaggatacgctgcgcgcgctgagcgccacgctgccgctggcgccggagcgggtgatgatgacgtaccaatcgcgcttcggccgcgagccgtggctgacgccgtacaccgatgaaaccctgaaggggttgccggcgcagggcgtgaagcacattcaactgatttgccccggcttctcggcagactgcctggaaacgctggaagagatcaaagagcagaaccgcgagatcttccttaaggccggcggcgagaagtttgaatatatctcggcgttgaacgacgagccggcgcatatcgacatgatgcagcagctggtggcgcagcgtctgtaatcatccataatctgtctattaggtgcatcgtgatcgggcggggatgtgttaacattctccgcttgttaaaccgtcaccaccgccaatcacatgaaatttcctggtaaacgcaagtccaaacactattttccggtgagcgcccgcgatccgcttctgcagcaggcccagcccgaaaatgaaatcagcacctcgtatattgtcggcatcgaccagacgctggtggatatcgaggcaaaagtggacgatgcttttgtccagcgttacggcctgagcctgggccactctttggtgatcgaagacgacgtcgccgaggcgctgtatcaggaactgaatgaaaacaacctggtcacccatcagttcgccggcggcaccatcggcaataccatgcacaactattcggtgctggcggacgatcgttcggtgctgctcggcgtgatgtgcagcaacgtgaaaatcggcagctacgcctaccgttatctgtgcaatacctccagccgcaccgatcttaactatttgcagggcgttgatggcgccatcggccgctgtttcacgctgatcggcgaaagcggcgagcgcaccttcgccatcaaccccggccagatgaaccagctgcgcccggaaagcattcctgaagaggtgatcgccggcgcgtcggcgctggtgctgagttcttacctggtgcgctgcaaggaaggggagccgataaaggacgctaccctgcaggcgatcgagtacgccaaaaaacacgatgtgccggtggtattgacgctgggcaccaagtacgtcattgccgacaacccgcagtggtggcgcgacttcctgaaggaaaatgtgacgattctggcgatgaacgaagacgaagcgctggagctgaccgggctgagcgatccgctgaccgcctcggacatggcgctggagtgggtggatctggtgctgtgcaccgccgggccgaatggcctgtatatggcgggctacaccgaagaagccaataagcgccagacccagcacccgctgctgccggggcatatcgccgagttcaaccgctacgagttcagccgcgccatgcgccgcgagcactgtgaaaatccgctgcgcgtttattcgcatatcgcgccgtatatgggcgggccggagaagatcatgaacaccaacggcgccggcgacggcgcgctgtcggcgttgctgcacgatatcgccgccaacggctatcaccgccacaacgtgccgaactccagcaagcatgtgcgcagttacctgacctactcctccctggcgcaggtgtgcaaatacgccaaccgcgtcagctaccaggtgttgaaccagcattcgccgcgcctcacgcgcggcctgccggagcgggaagacagcctggaagagtcctactgggagcgttaacccgctgaaaaagaaaaggtccggcaatgccggacctttttttatgcgcggtgcctcagatcgggcagccgcccattttttcttcttcgctcagggtgtccaactgcaggatgttcagcatgctgttggcgatctcgcgttcgcccatgaccacctgattggcgccgcgatcggtgatgtaggccacttcatcgtcgtagtgggcgcgggcgatgatctcgatattcggccgcttggcgcgcgccgaggcgacgatctcgccggcctcgtagccgttggggatggtcagcagcagccagcgcgcgcagtcgagcctagccagatccatcacttccggattggcggcgttgcccagcaccgtcttgataccctgttcgcgcaacgcttccacccgcgggcgggaattctcgatcaccaccagcggaatgcccgcctcggccagtttgccgcccagcaggctgccgacgcggccgtaaccgaccaccagcgcgtgattgcacatatccaccgggatctgtttctcttcttccaccgcctcttcgaggatttgctcttcgatggtttcggttttggccagatagcgttccagcagggtgaacaacagcgggttgagcatgatggacagaatggcgccggccagcaccagattgcggccgtgctccgacatcatgccgagcgcgatgccgaggcccgccaaaataaaggcgaactcgccgatctgcgccaggctggcggaaatggtcagcgcggtgcgcttggagtgaccgaacattttcaccagcaggaacgcggcggcggatttgccgaacacgatgatcgccagcgtcgccagcaccgccagcggttcgttaatcacgatcatcggatcgaacagcatgccgaccgagacgaagaacagcaccgcgaacgcgtcgcgcagcggcagggtgtcgtgcgccgcgcggtggctcagctcggactcgttcagcaccatgccggcgaagaaggcgcccagcgcaaaggagacgtcgaacagcttcaccgcgccgtaggcgatgccgagcgccagcgccaataccgccagggtgaacagctcgcgcgagccggtgctggcggttttcgacaggatccacggcaccaggcggcggccgaccacgatcatcagcgcgatgaaggcgatgactttaccgatggtcagcgccagctccatcagcagctggctgctgctggcgttgtcattgcccagcatattgccgaaggccggcaacaataccagcgtcagcaccatcgccaaatcttcgacgatcagccagccgatggcgatttgcccgcgctggctgtcgatcagttgccgttcctccagggcgcgcagcagcaccacggtgctggcggtggagaggcagaggccgaacaccagaccggagatcagatcccagccgagcagcttggacagccccatgccgagcagggtagcgacggctatctgcgccacagcgccgggaatggcgatagattttactgcgaggaggtctttcaaagagaagtgcaggccaacaccgaacatcaacaggataacgccgatttccgccagttccggcgccagtgaggtgtcggcgacgaaaccgggggtgaacgggccggcgagcacccctgcggccagataccccaccagaggggagatgcgcaggcggttcgccagcatgccgaggaggaaggcgagtactaaccctccgacgatggtggtgatgagcggtgttgaattatgcatccatactccttctggctatgcatcgcggcacgggagaaacgcaacaaagttacgaaaagatacatttagtttattgcatttgttcgcggcttgcttggctaatttggccttttttgtaaaaaagcagaggatttcacttaaggcatggcaatgagggggttttgtggcagataaaccaaataacattgatttatccgtaggataacccggatgaataaataatttcatccgggcaggcagcggagttattgcgctttatgctccatattgggcagtagcgcggtaataatgccgataagcggcaggaaagcacagatttggtagaccagttcgatactggtcaaatcggcgacataaccaagaactgccgcacctaacccgcccataccgaaagcaaaaccgaagaataagccggaaaccatgcccactttaccggggatcagctcctgagcgtagaccagaatggcggagaacgccgaggcgagaataaccccgatgatcaccgtcaaaatgccggtccaatagagggatgcatagggtaaaacaagggtaaatggtgcagcgccgagaatagagccccaaatcacgtatttacgccctatcttgtcgccaagaggcccgccgataatggtgcctgctgctaccgcaaacaggaaggcgaacaggtgaatttgggcattctgcaccgaaacaccgaacttatgtatcagataaaaggtgtaatagctgctgatgctggccagatagaagtatttggagaaaatcagcaccagcaggatgcccagtgagtaggccacggtacgttttggcagcggtttcagcagcgacgggcttttcggctgccctttagttgcccgatgctgatgttgataccacttgctgacctgcagcaacaccacgatcgccagcagcgccgccagcgagaaccaggcgacgttgcccttgccgtaaggcgcgatgatcagcgccgccagcagcaggccgagcgagctgccgaagttgccgccgacctggaacagcgactgcgccaggccgtgccgcccgccggaggccatgcgcgccacgcgcgaggattccgggtggaagaccgatgagccggtgcccaccagcgccgccgccagcagcaccagcgggaaggtgctcgccaccgacagcagcagcaggccggacagggtaaagcccatgccgatcggcagcgagtaaggctgcgggtgtttatcggtgtaatagccgatcagcggttgcagcagcgaagccgttagctgataggtcagggtaatcatgccgatctgcacgaagctgaggtggaaatcggcttgcaggatcgggtaaatcgccaggatcagcgactggatcatatcgttgagcaggtgagacacgctgatggcgccaaggatggagaaggcggtgcctttcaccgcactgcctttggcgggcggtatcgcgctttggctactgtcggtcatattattattagcctgataagttgttgagcacagagatgacatcttaggcaggacgttcaatttttaccatatctgaaataatcagactcacatcgcaaaaaattgaaatcagctgtcattaattcgcgctacaatttcggcctcatcataaaagccatttaatacacggagatccgccatgcgtttttcgctgaaaaccaccgcatgcgcgttggccgtttccctgacgttgctgtcgggggccgccagtgcctgggaaaaggataagacctacgccatcaccattctgcacaccaacgatcatcacggtcacttctggcagaacgatcacggcgaatatggcctgggcgcgcagaaaacgctggtggacggcattcgtcaggaagtggcggcgcagggtggcagcctgctgttgttgtccggcggcgatatcaataccggcgtgccggaatcggatctgcaggacgccgagccggacttccgcggcatgaacctggtgggttacgacgcgatggcgatcggtaaccacgaattcgacaacccgctgagcgtgctgcgccagcaggagaagtgggcgaccttcccgctgctgtccgccaacatctaccagaaaagcaccggccagcgcctgttcaagccttacgccctgttcgacaagcagggcatcaagatcgcggtgatcggcctgacgaccgacgataccgccaagataggcaacccggagtacttcaccgacatggagttccgcgtgccggcgcaggaggcgaagcaggtggtagagcaactgcgtaaggacgagaagccggacgtgattatcgccgccacccacatggggcactatgacaacggcgaacacggctctaacgcgccgggcgacgtagagatggcgcgcagcctgccggccggatatctcgacatgatcgtcggcggccactcgcaggatccggtgtgcatggccggcgacaaccgcaaacaggtggattatgtgccgggcacgccgtgctcgccggatcgccagaacggcacctggatcgtgcaggcgcacgagtggggcaaatacgtggggcgcgccgatttcgaattccgcaacggcgagctgaagctggtgcattatcagctgatcccggtgaacctgaagaagaaagtggagaaagcggacggcaccagcgagcgggtgtactacacccggcagattgcggaagatccggccatgatgaagctgctgacgccgttccaggataagggcaaggcgcagctggaagtgaaaatcggcagcgtcaacggcaagcttgaaggcgaccgcagcaaggtgcgcttcgtgcagaccaacctggcgcgggtgatgctggccgcgcagagggagcgcgccgacgccgacttcgccgtgatgagcggcggcggggtgcgcgattcgattgaaagcggcgatatcacctacaagaatgtgctcaaggtgcagccgttcggcaacaccctggtgcatgtcgatatgaaaggcagcgaggttgaggagtatctggcggtggtggccaacatgaagccggattccggcgcctacgcccagttcgccaacgtcagcctggtggcggacggcaagggcgtcagcgaggtgaagatcaatggccagccgctgcaggcggataaaatttaccgcatggcgacgctgaacttcaacgcgctgggcggcgacggctatccgaagctggacgggctgccgagctacgtcaacaccggctttatcgacgccgaagtgctgaagcaatacatcgagaaacactcgccgctggatgcggcggcttacgagccgaagggcgaaatcgtttatcgctaatcgccaccgcagcggcctgccccatgggcgggccgcctgttttcccgccgaaaaccccgccccaaacgcacgcaaaagtcgccgccgccgccttccaatgatagcctgagcgacaatttggttttgataacgcaaacaggaagatgacatgttgaaaaccgcaggctggctgctgcccgccatcgtggcgctggcggggtgttcgtcatccggccaacgtcacgaacaaaccctcagccaggcgctggcggccatcggccaggacaaggcgctggttggggcgtcgagcggcgtgatggtgcgcgatgccgagagtggcaaggtgctgtatcaggcgcacgcggatcagcgtttggcgccggcttccaacatgaagatgttcacttctctggcggcgttcggcgtgctgggggccgattatcgctttgaaacccggctgttgaccgccggcgagcagcgcggcgacaccttgcgaggggatctctatctgcagggcagcggtgacccgacgctgcatccggacgatctcgacaccttcgccgcagcgctggcacagcgcggcatccgtcatatacaggggcggttgttgctggatgccggcgccttcgatcagacgcctttcggcgccggttggagctgggacgatgaacctttcgccttcgctgcgccgatctcggcgctgaactacgcctttactcccggcggcgatatcaacgtggtgcaggtggcggtgcggccgggcgcccgcgccggcgcgccgggacgggtgagcttctatcccgccaatgacgcggtgacgctggtcaaccgcaccaccaccggtagtgacaccgcgctgacgtacgagcgccggccgggcagcaaccggatcgtggtcagcggcaccatcgccgcgcaggcggaggccagctcgcgattgattaccgtcgatcaaccgtcccttgtcgtcggcgctttattgcaacatgctctgcgcgcgcacggcatcaccctgcgcggcaaggttgaagagggcgtgacgccggccggcgcacagctgctggcggaaaaaacctcgccgccgctctcccgcctggtcgtcaccttcctgaaagtctccaataacggctacggcgagatattgaccaaggcgatgggccgcaagacgcagggtaaaggggattgggccgccggccttcaggcgataaacggatttgtgcaaagccagggcgtcgcggccgacgcgtatcgccaggtggacggttccgggctgtcgcgcatgaaccaaatcacgccgcagcagctgacgacgctgctgctggcggccagaaaacagccgtggtttgccgactggtatcacgccttgcccgtcgcgggcgagccggggttgctggtgggcggcacgctgcaaagccgcatggtgaacagcgcggcggcggggcgcgcccacgccaagagcggttccatgaccggcgtatcgtcgctcagcggctatgtcgattcggcgaccgggcggccgctggcattcgccatcatcagcaataactatctggtgcccggcgcgcaggtgaaggcgctggaggaccgcctggtggagacgctggcggcctgtgacgccacggtggtgtgccgctgagcgcgcggcgtcagtcgcgtttggcgatgtcggcgaagctgccggccagcaggcggcacagatcggcggcggccagttcgatgtccagcccgcgtttgccgccggaaacgtagatggtggcgaacgcttgcgccgggctgtcgatcaccgtcggcagccgttttttctgccccagcgggctgatgccgcccaccagataaccggtgacgcgctgcgccaactgcggatcggccatctcggcctttttggcgccgagcgcgcgggcgaccttcttcaggtccaactgggtcgcgaccggggtgaccgccaccgccaggtgtttggcgtcgccgttcagcgccaccagcaaggttttgtaaacccgatcggcatccagccccagctttctcaccgcctcgtcgccgaagttggtttcgtcgctgtcgtggtgataaggatggagggtgaaggcgaccttttgtttctcaagcagaacgactgcgggcgtcatgatgtgttgtccaaaatgtccccggcggggaaagggtgataaccagccttaaaaatacaaaaatccaacctgcccggcaacctgagcggctgttacataaagcgggttgccaagatattcaccgggttgctaccctgtttactgtaaccgttaacacggttgctatgcgtataactagaatacaagaaattcctctttgactggccaatagcgatattggcctcttttttacccctgcggctgcagcatcgccggcaggttatcctcgccgtacaggtgcaatgcgccaaccgccaccacatagtcaccggcaggcagcgcctccagctgatgccgccagtcgcgattgcgctgatgcatcagcacgtcatacagcccggcgctgaaggtggcgggcagcgtgtccagcgtaccgcgcggtttggcgtccagccaccagctcaccatggtttgcagcagccgcgcgttggtatgccagtgctccagcgtatcgcgcagcagcgcaatgccgccctccggcaattgttccagcatcgccagctgctgctgcgcgccttccagctcgatcaccggtttgtcctgcgcccgggcggcctgcagcagctgatagtccacgccatattccgcgcgcagccccaaacgctgagcctggcgcgcctgcatcatcagcgccacctgccagccgggcagggtagcgaaggcgtgcgggtcggcgcccagctcatggcacagcgccagcaaccgttgatattcttcggcggacaggcgctgttccagctctggctgcagctcggcgtggtcgaaaggggaggcggagtcggtgatatcggcttcgacgatcagcgcgtcggcctgctgcagccgggcggccagccggggcggcaacggcgacatatcgacggtgcccatatggatgctgcccaccagatgcagccgacgatcgccaggcagggtgatgtccaacgccggataagcgtaacgcttgggcgagatcaggccgagaaaggcggcgaggcggcgtaacagttgacccatacggcgtggctcctgaataacgggtgcgcgtttcagcatgaaaggcgaggggaaatcgttattcatgctaaacgctatccgccgcgcaggaaagcccggaaaacagcggggcgccatgacggcgccccggcgatcacttctgcggtttaaaacgcagcaaccggttggcgttgctgaccacggtaatggacgacagcgccatcgccgcgcccgccaccaccgggctgagcagcgtgccggtcagcgggtagagcacgccggcggcgatcggaatgcccagcgtattgtagataaaggcgccgaacaggttctgcttcatgttgcgcagcgtggccttcgacagctccaccgcatccgccacgccgtgcaggctgtggcgcatcagggtgatggcggcggtctcgatggcgatgtcgctgccgccgcccatcgcgatgcccacgtcggcctgcgccagcgccggggcgtcgttgatgccgtcgccgaccatcgccacgcgctggccctgcgcctgcaactgtttgatcgccgccgctttgccgtccggcagcacgccggcaatcacccgatcgataccggcctctttggcgatggcgttggcggttaccgggttgtcgccggtcagcatcaccagctgatacccctgctggtgcaggcgctgcagcgccgcgacgctgtcctcgcgcagcggatcgcgaatggcgaacagcgcggccggtttaccgtccacggccagcagcaccggcgttacgccgcgttcggcctgggcgcgcatcggcgcatccagttcggcggtcgcgacctgatgctgttccagcagcgcggcgttgcccagcagcacctgcacgccgttgatctccccgctgacgccggcgccgcgcagggtgcggaactgcgcgacctgcggcagcgtttgcccggcggcgcgttccatgatggcgcgcgccagcgggtggttggagccttgttccagcgcggcggcccagccgatcgcctgctgttcgctgacctgattgaaggtcaggatctccaccacctgcggtttcccttcggtcagggtgccggttttgtcgaacaccagggtgtccagctggctggcctgctgcagggcgtcggcgtcgcgcaccagcacgccgaactccgccgcgcggccgacgccggagatgatcgacatcggcgtcgccagacccaatgcgcacgggcaggcgatgatcagcaccgtggtggcgatcaccagcgtatagaccagctgcggctgcgggccaaagaagtaccatatcgccgcgctgaacagggcgatagccactaccgctggcacgaacaccgccgagacgcggtcagccagttggccaatcgccggtttgctgctctgcgcctgacgcaccagtttgatgatgcgcgccagcgtggtttggctgccgatggcggcggcgcggaacagcacgctgccgtcgtcgaccaccgtcccggcatgtaccgtatcgccggcgcctttctgctgcggcaccgcttcgccggtcagcatcgcttcatcgagccagacttcgccctgtacgatttcaccgtcgaccggcacgcgatcgccggtagtcagccgcagcgtcatgccgagctgcacctccgccagcgggatatcgcgctcaccgtcgtcggtcaccagccgggcggtgggcggcgtcagatccagcagccgctccagcgcctgtgaagaacgctggcgagcgcgctgctccagcgcatggccgaggttgatcaaaccgatgatcatcgcgctggcctcgtaatagaggtggcgcgccgccatcgggaagaaatcgggccaaacgttgacggcgatcgagtaaagccaggcggcgccggtgccgagcgccaccagagtatccatggtggcgctgccgttcatcagcgcgcgccaggcgttgcggtagaagtgtccgccggcgaacaccatcaccgccagggtgatgacgccgaccagcagccaggggcgctgggtttccggcgtcagcgtcatgctgccgccgaacagcccccaggccatcagcgggatacccaacgccagccccagcgccgcctgccagctaaagcgcttcatgttggcgcgtgcggtctgctgctggcgttcgcgacgttcggtctcgtcctgaatcatctcggcgccgtagccggctttttccaccgccgccaccagcgcttgcgcatcggcggcgccggtcaccagcgcgctgcgttccgccaggttgacgcgcgcgtgctctacgccgggtacgctttgcagcgcctgctgcactttattgacgcagctggcgcaggtcatgccgctgagcagcagctgtacgctgtcgtccgcgctgtcggttgccggaagggaaggttgcgccgctggctgaacgtccggcaacgaaggtgttgcgtcagtcaacggctcagtttttgggacgacggcgcccgccacgctggcgtgataaccggcgtgttctactgcggcgatcagcgcctgcggatcggcatcgccgtacactttcgcgctgtcgatctcgacctcggcggcgaacacgcccggcaccgcttccagcgccttgcgggtgctgccgacgcagtgcatgcagctcaggccgctcagctgcagttcggtatcggcgcgcggcgcgacttcggcctgataaccggcggcgatcacgctgtcgatcaatgcgctgtccggcgcttcgccggtcactttggcgtaatgcacgttaacgtccgcctgttcgacatcgctgcggctttccagggcttttttcacccgttgcgcgcagttcatgcaggacagcccctgcaatgccagcatagtggtgtgtgacatgattggactccttgcttaagggcggtgtttaaaggttgaccgcctgacctgttttcactaagaagggagcttaaaccttccagcaagggtaaggtcaaggcggtttttacttgcgcgggcgtgacggtcgttttgtgttgtataacaaggtgttttatcggcggcagcgcggtcggcttgcccgagccgcgctgccgcgttggggttacagcacgaaaggaatgaaacatttaacctggcgtttatagttgcgccaaacctcgccgtagcgcttctctgccattttctcgcttttgggaatggcgtcggcgaaatactgcaccaggttagtcagcggtgcgatcaggccaaacaggttgccggcaagcagcccgaagctgacgaaaataagaaagtcgccgaaataattcggatggcgcgccaacccccaaaagccactgttcagcagccggcctttattgttcggatcctgtttgaagcgccgtttttgataatcgctgccgaagtggaacagcgtgcctatcaggtagaccccaatggccagccattgcagcgcgctccacggcccctgcagctggctggcccagtagaagggcaggcagtacaggccgccgaagatcatgaccatcatcaccgccagccatggcacctgctgcgtgggcatcacgtccttgagtttggccgcggcggtgttgccgtaccaacgtgtcagcacgatgttcatgcgcagcaggtacaggccgaccatgacaaggatcagggctttgtggctcagatcgccctcgccgaaatagcaatagaccagggtaaccggccccatggcgttgaacccccacagaaacatcgggcgagtgtcctgagcgccgcggctggtaataaacgccagcagggcaaggatcaacaaaacagcggccaaagcaatccatacgttcattgtgttctcctcagcggattaggggaaatcgttccccgggggcgcgcattcgccggatggcggcgcggtcaaaatgctttgccagctgcgtctgggtgctgcgctgccccattgttgcaggtggccgaagcgggcaaaaaacaccgggggagcgctgagcgccagggttgctgcgagctcgcgacgcgcctcggcgtgttgcaccagaacgctgatcggatgcaatccccaaccccagtgttgcagcgtgagccacagacgtccaagccgcatgccggtggcgaacaggtgctcggcactttcgtcgttcagacacagcgccaggtattgcgggccttccgcgacgcgttgcgccagcccttgcgccatataagccggcaagcgcagcccggtcgccagccggcttaagcgaggatgaaacgccacttggaagaagcgcttgaatgctggggataccgggccaaacaggtggtgcaggtgaaaaccgtcgtcggtaggctgccgttcgttgaagcggatgtattgataggtttcgcgccaggcttggcgatccgagaaatcgagcgcggcgtgacgagcggtgagctgcgcgacccgacggcgagcgcgttcgtcacctgcgatactgagcgaactcgccgttccgtcgaacagggtctgcagctgcatccgctgcgcttcattgattggcgtaggctgataggccgctcgtgcggtatgccgctcgccgatcagctgcgccaattggtgatgggcggcgcgatcgggcgcggcaggcgcggcgggggcaaagctcagtaaatgcgtggggccatgctcccaacgccaggcgagaggcgagcctgcacagttgagcagcgcgctgaggtactcgaagaaaatcccgcagctcatcagcatctcgcgttccagcgaaggcaggctctgcaaggcgcgacggcggtcgatagccaaccggccacatcgggcggcggcgttatagtggagagaccagggttggcagttgtgtgaagagggcgcctgccgcgcgatgtccacggcctgttgcagcgccgcggcgaaaaggtcttgggtcatgataaggctccgaaagctgaaggggcgggcagggaaaatacggtaacgttcgctctgaacgacatgctttcctccgccggaaagcagagtgcgcatgcccagtccaggctgcgccacagccagaagcgtctgctcgccaaactgccgtcggcgcttgagaccaacccggtgtgccagtcgatgccgatcgtccgcaattcgtagggcaggccgcggccgtggctttttaaaaatgcttcgcgaatggcccagacggcgcaggcctgtatgcgtcccaatcgctgctccgcctcgccaaaggcccagcgcagcgccgcgccggagaaggggcgataatgctgcagatcgatgccgagcgggatatcgccggtggcgctggcgtaccaggcatgcgaatggctgagagaaacgtggcggcgtcccagcaggaggtgttcgccgaacggttgtccactcgcctcatggcgcagcgtaaagccggtcgcgtccccccggcaccatgtccggttcagcagcgcgatggcctgtgcccgcgcgtggtttttcaccgccgacagacgccgcaatccccgaacggcggcgcagcggtgggggccgcccagcgcgatgacgatacgtggcgccacgctaagctcgataaccatcggcgatgcgttctccgctgatttcgtcaacgacttccgccaactgattaaagcgttcaaccaggctttgaaacagcggggtttgcatctcgcgctcgaacattttcagcgagttcagctgaatgatttcgataaagtgaaacggcgcctccgccgaagggctgacttcgatgacatcgaaggcgcgtaccgcatcgaggtggcggcaagcctggtaatcggtcgtctccacccagtcgcgaaacgcggcgcggtgggcgatgtcttttagccgaatcttatggacgataatgtgcatctgggcggcctttttaaatgggttgatggataagcaaatggtaattgatgccaccggtgccaaagccgttgatcgccgcccgacgcccgtcttcaccctgtggccagtcgagcgcgatttgcgggatttcggccgggatcgccgccagcggcagttcggcattcaatgtcgccaccggcgtgggcgggatttgaccgtgttcgaaagcgctcagcactttacacaggctgagcgcaccggcgccggcgaaacagtggccgaagttgtacttcaccgaaccgatgtacaaaggggcgcgcgcggcgcggtgatacccctgatgcaatgacgcgacttctgcccgatcgcccagttcggtgccggtgccgtgcgcttcgagatactgtatctggcgcgcttcgacggcgctcaggctctgggttttttcgattgccaacgcctggccctcgggatcgggcgcggtcatggaatagctgtcgcaagatcccgatatcgcttcgatggtggcgatggcccgcgatgtcgcctggccggtcagaatgaagaagccgccaccgtcgccgggagtaaaaccgtcggcttgtcgggcgaaaggccgcatacgcgaagcggaaagcatcatttgcgcgctgcacagcaccatatcgcgttcgagcgtcgccgtttctatgccgccgacgagcaccgcatcgtagcggccggcctgtaacgccctgaccgcattgtgcaaggcggccagcgaactggcgcaggccgcctcgaccgcgtagcagtccgcctcgacgccgagctgttgcgccaacagctgcgcggtgccgaggccgcaggcgccatgccagctccagcggttgatcgcgggttggggcggtggcgaaagggggacgtcggcggaaggcaatgccggccacagcgcgctcatggcctgttgtcgatcggcgctcaaagacaggttgctggcgacgataatggcgatgcgttcaaagcgtcgcaggctgtcgggccacgccgcgcagccgttgagggcgtgcagttgtgtgacgtcgaggcgctgctttttggccggcatcataggccgcgtcagctcaagccgcaccggatcgtgcgttgagaagcacatggcatgagcggtgtaggcgctgagcttttgcggcgtgggtcgcacgaaggcgccggggtgcaactgctcggggctgtgatcgcgcagggcgtcctcaccgttgcgcaaggcctgccagaaacgcgctttatccagcccctgcgcggtgatgggctgatagtcgatgatgctgatgcgtggcgaagccgtcggttttaatgaggggggagacgccgcgtcaatccgccagcggtagccggtgaacgagtggccggcgcacgtctgttgccgttgcaacagcatgtcgaggagatggcagaaaacctgattggcgccggcaaaatagccggcgctcggcgcggcatcctgtcgttcggcgatcagggtcgacaattgcgctatcgctggccatccctgttcctgagcgacgtccagcgggcaaacgaccaggctgatcgccccctccagccaacaggccgaagaggaaacgccctgcgccaacagcatgtccgcctggggttgatggtggaagcattgtacggcggtcagcaccgccatgcggctgtcggcatggcgaaaacagtcttgcgccaactgcagcaagcgcaggccgcccagatcggcgccgtcgagggtttggcatttaccgcgcgtgcgggcgaaatgggcgatgcgcgcgggaatgctggaggccatttcccctacgcgatcgtgggatgaactgccgaacgcctgggccagcggctgtttgtaatcgtcaatccggcgcatgaccgctgccggtgagagcccctgagcgtcaagccgttcggccagcctgcgcagcgcgccgattttggtggcgttgcgataggccgcatcactgcccaaatgggtggcgcaaaattgatcgcagcggtcgcgcaacgcgtcggataacgtcagatgctgcatggcggcggaggcggcctgcagcgccaggcgggtctcgcggctgaccgccagtcgaaacagcggcgggatggcgaattttttgaaatcaaacgcggcgtcgtcgatctggcgaccgcggatcggcgcggccgcatcgctccacggcatcggcggcggggcgtcgaacagcgccgaccaggcggcgccgttggacagatcgatacgatcgatgccgggcagtgcgcagccgatgccgaccagcgccagcggcgcggcatgaatttcctggttcatcgcgcgttcacctcggacaaacgtcctctgtccaccttgccgttggcattggtgggcagactgtcggcgaccaccagttggctggggagcatataggcgggcagcctgggctgcaggaactgcttgagctccagcaggttggggcggagcgcgccgggatggagggtgatcacggcgatcagtttttgcttcagctcgccgagctcgacatacagtgcggcctggctgaccgagggatggtgatgaaggatcgattcaatctcacccaattccacccggtagccgttgattttcaccatgtcgtccagccggccgcggtagaccagcccattcgccgtcgtctccacccagtcgccggtcgcgtgacattggcgcggatgccattgcgcttgccgcgatgaggcgacgttgctgtagccgggggtcacgcacggcccgccgatcagcaattctccgcgtcggcccggcgtaccgtcaatcggctgcaggcgcccctgttcatcgaccaactgcgccgtcaagccgggcaacggatggccgatggggatctgctccagcgtcgccaactgcgttcgatccagcgcgtaggcggtgcagacattggtttccgtcgggccataccagttgctgacgcggcaccgggccggcagatgcgcaaccagacgcctcagcgcggcggccggataaggctcaccggcgaacgtgacctggcgcagcgttttcaccgtcgatggcgccagcaacgcgctcttttccagcatggctaaaatcgaaggcacgctgtaccacagagtgacgccgtgcgtttgcaatccgcgaacgagagcctggcaatctttctgttcatcttcgcgcacgatccaggtcgcggcgccggcgcaaacgccggcgaacagatcgaaggtgctcagatcaaaggcgaaactggcatgattggccagcacgtcgcgcgccgtcagttgtgtatcgctgacggcccagccgatgaaaaacgtcagcatgtcatgggtgatttgcacccctttcggggtgcctgtggagcctgaagtatagagaatggcggcgaggggggagccgagcgcggcgatcgcttccggccaggcgccatcgagatcggtgcggccatcgagcgcgttcaaccagccctcatcgacgatcagcgcgggtgaggcggcggcgataatgcgttcgatgcgcgccgtcggttggctgaaatcgatagggacatagtggttgccgctcagccaacatgcgtacatggcggcgacggcgtcgggccctttctgcaggttgagcagcacggcctgctgctttaacccggcatgtcgcagcgccgccgccatcatgcaggcgcgatcggccaggcgacgatagctccagcgccgatcgccgcacagcagagcggtgctttccggcgcttggcgggcgtgccggaacagggcctccagtatcggtgaaatgaaggttgccatgatgtcagacctcggcggcgcgtgcgcgctcttcccgtcggacatcgccgttgaccggcacgccggtctccagcgccgccgccaccaaaatggcgtaggcttcatccagatcttcacgcgtgtgttcactggtcacgctgatgcgtaagcgggcgtcacccacgctgacgcccgggaagaccacggtctggcagaatagcccgcgcgcccggacggcgcggccgaacagcagcgttttggcgtcgtcgcccaccaccaccggaatgatggccgagtcggaatgctcaaggtcaaaaccggcgttaagcagcagcgtgcggaagtagtagatgttgtcccacagcttggccagtcgctcgggttcacgcagcatcacgtcgatggaggcgatcacgccggcggcgactgcggcggggatggtggcggcgaaaacataggagttggagtagaaacgcaggtattcgaccacttcgccatcggcgcaaacgaagccgcctaaccccgacagcgccttgctcatggtgcccagctcgagatccacccggcctttcatattgaagtgttccgccgtgcctgagccggttttgcccaagacgccggtcgcgtgcgcgtcgtcgaccaatacgcgtgcgccgtagcgttcggccagcttcatcaggcgcggcagatcgacgatatcgccgtgcatgctgaaaacgccatcggtgacgatcagcttgccgccggggtgatcggcgtatttggccagcgatttctcaaggctggtcaaagagtggtcataaattttccgctgcgcgcccgccaacttgcagccgtcctggatgctcatgtggttgatggcgtcggtgaacaccaggtcgtgtcggctggtcagagccgagatgcatcccaggttggccgagtagccggacggatagacgatgcagtcttcgcgccctttgagcttggccagtttgcgctccaattccagatgcagcacgttgctgccggcgatgatgcggcacccggtattggtggcgccgtacaggccggcggcgtcctggatggcgtggatcacttccggatggttcgacaatcccagatagctgttggagccgaacatcagaaattcgcggcttttgccggtgacctcgtcgaacatgaccgcgcggtttttgcacggcgtttcaagcggcatgccgtaccagtaaagctgacgctgttttttatcgcgataaaaagcgccaaactcacgcgttttatggaacaaatccgggtgctcgatgccgacgaagtcccgcatggtgcgcggatcgccgagctcatcgcgcgcgtccggcgacgcgggcgctttggtgggctgcggcgcagcggacgcggcggtgtgttggccaaagcggctgaaccacgcttcgccctgttcctgaagcagccgcgccgccaggttgtgctccagctcagccaacgtgcggcactccgccagcgctgcgttatcgtccaggcccagcgttttgagcagctcgttgcgcgccatcaccaccgcgacggagtcgatgcccaggtcgccttcgatggcggcgtcgggggacagatcacgcacttcatatccgctgtgggtgacgaacacctggcgcacgagagcgctcaaccaggcctgaggcgtctcgggggcaggttgcgcggcggcgttcggcgtcggcagcgtgaaaccgcgctgcaaaataccgtcgagcgcatcctgaatggttttgatctcctggatctccagcggcgtatttaattgaaactgacggttcagcaccatggcaatttccgccagcgcgatggagtcgacgcccaaatcgttttccagatggctggtcagggccagtgccgacggttcatactcggtcagccgggcgaaggtgtgcagcaccgactgccggacggcttcatgcgcgtttgcggcgctatcgacggcgtgaacgctcatgcgacaccccctgcggcgacttgcgcttgcaaccgttgcaccagcgcgaccatcgcctgcaccgaggcgaaattcgccggatggatctcatgcatgccgatggcgacatgagactcctgacgcagaaaatccaccagatcgaaaatggaggcggaatcgacgacgttcagttcaaacagcggggtttgagcgttcaggccgtcgtgatcgccatccagatactgggtggcgatatgctggatcaatttgctttctaacattgcgagctcccgttgctaactggttatttttcgccgacgatcagggtacgtgggccggcaattttcatgatgcgcgcgttgctgaaccccgccagacggaatctgtccaggtattcctgcgcgctgctctctatgccaccgtcggtggagaccagcatgttcagcgacagcagggcggtaaattccggccctgatttgtcttcgttcagcggcgtttcggaagcgatgaagcggccgccggccggcatcgcccgatagatgttgcgcaggatggtcagttgggtttccggggcgtagtcgtgcagcatccatcccaggtggatcaggtcatagccgccgatcggcagatcgccgctgatgacatcgccctccacgacgtcaatgcgttcgccatagccttgcagcgtcagcttgtcgcgcaaaaacgccgaggcctgcggcagttcgcagatcgccagtgcgatccccggataagcgtcggcgatcgccatcggcaggctgccgatcccgctgccgatatccaaaaacgcacggtgttgcgagaagtcgtaatcgcgaacaaagccggcgataaagggcgcggcgaatttaccgagaaactcctggaagtccgccacgtcgtccggattttggtacaggatgtcgaaccaactgcggtcatcgccgaataccgtgcggcgctggtgggcatcgtttcgcaccgccgttttcagctcgccccacagcggatacaggaaggtatcgatgtggcggcccagccatcccagccactgcggttcgtcgctcaacagaaaagcctggtgggcggcgggcagatgataaaggccgtctcgttggtcgagataccccatggcccgcagcgcgatgagcaactgctcggtcgaacgcgccgggcagtcaagccgcgcggcgatgtgcgccgcgtcggcgtcccgatcgcgcagctgatcgaacagcttcagcgccagcgcggcggtcagcgccttggcctggaaaaagcccatcatctgattgacggcatcttgcttggttaaaggcattgctggctccctagtctaaaaaggtggagagttcctcgcacaccgtggcaaaggcgccgacgaaacggtcgatctcggctttgctgatgatgagcgggggttgaatacggatcaccgtcgagctgttggcggtaatgaaggtcaggatcttgtggtcctggcacagcttggtgacgaatttcatgcagaacatttcgccgagcgcctgttccatgcgatccatcgccgcccgcagatgggcttgcaccggatcgggcaagaatttccaggtggtgtgccaatcgcccggcagccgggtggcgaattcgcgggcggaggcgttgaccgcgccggtgaacgcctggtcgaactggatccccagcatcaggccgcggccgcgcacctcgctgacgaacggatagcgggcggcgatctcactcagtgcctgcttaaagtaggcgcccatccgttcggcatggccgaccaaatcctgcgccaggatctcgcgcagcgcgctgagggcgacgaccgaggcgaggttgccgccgccgtaggtggagctgtgcaccaggaagcgatccgccgtgccataggctttttgccaaagatcggctcggcacagcgtggcgccgatggggatcaggccgccggacagggatttcgacagcatcagcacgtccggctcgataccgtcccattcgcaggcgaaaagtttgccggtgcgcccaagcccggtttgcacttcgtccaccatcagcagcacgccggtctcgcggcagagctgctgcaccgcctgcaggtaaccggcgggcgggatatgcacgccgccttcgccctggatcggttcgatcatcagcgcgccgacgtcttcacggttcagcgcttcccgcagcgcggcgagatcgccgaacggcacttccaccatcgcgtccagcagcggtgtgaaatagcggcggtgtttgtctcgtccggtgatggacaacgcgcccagcgttttaccgtggtaactgttgcgcagataggcgatgcccggcttgcccgtcgaggccttggcgatcttcatcgcggcctcgacggcttcggtgccggagttgctgaagaacacccggcccatgttgcccggcgccagacgacagagcacttcggccagcttggcggtctgttcgggaatggaaatgtattgaatgaagttggggccttgagcgtcgaggtagtttttcagcgcgttgaccactggctgcgggttgtggcccaggtttaggcacccgtagcccgccaccatgtccaggaaagcctcgcccgcatcgtcatacaactgggtgccggcggcgctgcggaaaacgttgtcgcagcgctgcaacttgaggaagtccaccatcatggggttgatgtattgatgatagcggtcgagggtgtcttccctggccggcgtttgggcgatgaccgcgtcgataaacgccaggcgcgatgcgggcaacgccgcatcagccgattccccggcatagatgtcatggtggtagtagcgcttgagattggtcacgctctgccgatcgatgcgctcgccgtacgaggccagcggataggcgaagaacccgtggcgctcggcgatttcaccgatctccagcactttttccggcgccagatagcggcccagcgaaaagttttcccgccggttttccagcgccagcacaatggtttccgccatgcagccgttcaattgttgcttgatggtgacgttgagcgattctccacccaacttgaccgcatcggtggcggtgacgcagccgccgtcgatgatcagaatgtcatcccgcgccgggcgcgtttccgaagcgatatcgcgcggcagcgccacgtcgatgaagatcgagccgggttgcagtctggcggggtcgatcacgccgccggcggaggtcgcggcggcaaacagtttgcagcgcgggtagagatcttcgggatcgctggtcagggtgacgcgcgagtgatactcctcgggcaaatggctgagcagttcgctgcgatcatggttgccggcgcggtgcagcaaatggagagagaaaccgtgcgccagcagcagacggcttagcgccaggcagatcgatcccggatagccgacgatggcgacgggttcctcctccgggcggatttccagccaggactggatctgcatcaaggccttgtagccggcgtaggtggtcagcgagttgccggaggtgaccggcaccggcgacttttccgcagtggcttcgccgcgtcgcccaacgatagaggtaaaaccgccgagaccgaccagttcggcgccatcgccggccagctcttcgatgccttggaccaccctggcggcgataccgcgtgcgtcggccagcatttcatccgccaccagcggcatgtatttgatcaccccttcgcaagtggcgccggtcgccgaggtgatcctggcgaagttcataaagggaaccaggttttgtcgttcccacagttcacgcgtatagccgctgtgctgctcggtcgagttgcgttgcagcagatcgagcattttgacgtaacgtttcaaccccagcgaggtgggatgagcgatgaatccgaatttcatgaggtggcttcctgtgtaggatcttggtcgaaggcggtgctggtcgattcgggctgttgggccgcccaggctttgcgctcctgcagggcgtcgtggtcgctcggatcgcgctgccagcctttggcggtggccagcgagataccgtcgccttcattgttgtgccccagcaccacggagaacagattgagtcggtgcggcgtggtcagcgcctggcgaatgacgtcttcgtcgaaatgcgtaagcgttttgctctggatatggaagttattgaccgtttgttcgacgtccggctgttcgacgttcaccaaccgcatttgccgtgaggtgcggttgaacagaatgcgttcctgataggtattgatgacggacagcccgccgttgcataaatagaagacggtgatgcttttattcagcaactgtggatgggtaagaatgttgtcgataaaagccggcaggatgtccggtacgatccctttagcgccgtcgccgataaacgccatcacgtggcttgggctggtgtaagccaggtagccggtggccagcagagcgtcgcccatcagggcgcggccataccagccggaaaagccgcggcgcgttttggcgacgttgcgcgcggcggagatgccgcaccggccgacgtcatatacgccggtaaaatcgaacccctccgtttcgatcagctcttcaatcactcggttcaactggcagaagaagtagttggccgacatgggcagactgggaagctggctgaccacgtcggaaggcgaatcgagataggcggcgatcagcgcgcggcgtctttctcgcaatgccggatcgacgtcgagatgcgctttcaccgtgcgcaggaacgccagacagttcatgtgcaggtgcagatcggcatagggcgacagatggcgctcatcgtgcgtaagctgcaccaggtgaaccttgcgctccagcctgccgtcggagaagggggtggtgatctgagcgacgcggcttttgatcataaacaggctctgctcgttcatggcgttgagcttgtcgttggtgtgcaggaagttgtagacgcgcgggctgtagccgtaaatcgccagggtgcccaggtagtggggattgcgccgaccctgataatatttcggcgccgagcctggatgggccaacgagtccaccagggcgatgccggcggcgtcggcgatgtcatggatcagggcgtattcgtcgtcgctgaccgggcccaactgccacaccagccgttccggcccgcggttgatcagcgctatcgcctgggccaggctttcgctcatcggcagcggatcgtccgccgacagaaccgggatcggcgagggatcgcagacggcgccctccagcgacagggtcgactccagcacgttttgcgtcgccagaatcaccaccggcccctggccttgatgataaaggcggaaggcttccgtcaaaccggtgccgatcgtttcgacgtcatcgatataaacgaacgggatgcggcgggcgacgagcacttcacgcatgtcttccgtcggcgtcagcgttccctggaagctgtaccattgattgccgcggttttccgccgcgacgatgatgccctgggcggcggtttccttgaggttggccagcgtccccttgaattcatccatcattccggaggtcactacgccgaggaacggcatgcgatacagctgccagttggccatggcgccgcaggcgatggcgtgttcgttagggccgcgcaggatcagcgcgccgcgcgcctccgcatgccgatccagatagccgatcagattggagatgatcgacccggtgtaataggacaccagccagcgttcggcggcggtacgctcgaaaaattgaatcaactgctcacccagcgtgttgtgcagcgccagcgcgccgatcggcttgacccggcggttggtgtagttcatctcgaagaagtccatccacaggcacaacagctcggtttggaagatcgccggatcttcgctgcgcacgatttcgcggtattgctgcggcaggtagcggaagggcgatcgcagctggcgaatgaacgcaacggtggagaaggtggtgtaaaacgcgggaatgccgctgcgctgcaaggcgctgtaaaaggcgtccagatcgcgatcgatctgttcgatgctgtcatcgacgccggccggcgtggtctgatcgtagaacagcatgcccaaatgaaattcgggacgctgttccagcgcatgggtatagatgatcttgccggtggcttcggccaggctggcgcattggatgatgcgaacgttgatagccttgttttggcctttgagaaagtgcagcgccttttcgcgcgcggcctgataaagcgagtccgccgccagatccaacagtttcagcggcatctcggactggatatgcacgcggttgaaaacataatcgcggatatcgttcagtacgctgagcccggtttggaaaaacgccgggttgcgcgtcaccaccaccacgccgaccgtcagagtgtcgggatctgcgtcggtgcggcaggcctggcgctccgcttgccacacttgctcgtaggcggcggagttggtgagtcttgcttgtcctgtcagggtcgtcatgatgagttccttgtgcagccaaaatggagtgacggcttcagcctggcgggcaaattcggcacgacaaagcccgcgacggtctctgcaggcggcggttgccgcgcgcatcaccttcgttgaattgtgctgttttcaggcggatggtttaccttcgccggatgtggtgctgactagccatcggcacgttctccgcgttgaataatgaccgtcccgctgtcgccgtcgagaatcaaggtgtcgccgctgttgatcagctgggtggcgttcttgagattgaccgccgcggggatgccgaattcgcgtgcgacgatgcagctgtgggacagcgcggagccgatatcggtgacgatgcccgccgccagcgcgaagagcggggtccagctggcgtcggtaaagcgcgccaccaggatttcgttgggctgcagctcgccggcctgcgccagcagatcggtgatgacgcgcgccttcgccaccactttgccggggctggccgccaggccggacagcatgccggcggcgttttccgccgtgggggctttcatcctgggctgataccccccgacgatcgccatcggcggctcttccgcatgcaggttcagcagatgctggtggcgattgcgctcgatcagatcggcggcgaacgcctcctgcgccgactgttcccccgccataaacgcgcggaagcgctcgaagtccacatagggcagatcggcctgtttgaccaggccttgcgcctccaggcgccgcagcacttccaacatgatgcggcggtagaaccaggtttcggtgacgaaggttggccgggtcgcttcgcggcgttcggccatcacgccatacagcttggtgatgaacttcagcttcatccggccaaaccagggcatcgctttaagcagcgtcgcgctgtcttcatggcgcagccgctctgtttcccgcagtttcgtgtgcagatccaccggatgttgcagatacattttcatcacttgcagcaggtagctgggatcgtcgttccagcgcggaagactcaattcgaactcctggcggccacgggcgccgaactcgaacaggaaggcgctgaagtcgctttgccagaaggcgcgcgattcgggatcggtgggcaggacggtgaccagttcctgtgcgctgtgtcgctcgaacacggccttcaacgccggttgacgattgaccgtctccaccaggctgagaatgcccagcgtgacttcgatggtgcgcaggttgttcatcgacgccttgatgcgattttgcaatccgttgccgcggcctttgaggtaacgttcgcaggtcagcgccagcgcatcgtagagcgcgaacgactgaaggaagaagggcatataggcggcgcagctgtcgaggaagtaaccgtcgatgcggctgagttcccgctccagctcctgatgcgtcatggtggtcagatccagcgccagaaagcggcgcgtctcgcgctggcgcagggcgatcatggcatcgacggtcgcgccggcgctgcgcaggttatgcctctgctgtttcagccaatgccaggcgctcttgagataggcccatccctgtacgccggggccataggggtttttgtacccgctgaaatcgatatcggcggtggcgtagcgggtcgtgaacttcatttcgtcgcgggtgggcgggcattggcggagcatgtaggccgatccggagatattcagatagacgtagccttgcaaataccccatataaatctgccaatcgccgatatccgccagccccatggttttgatcgccgggccatgaatatgcttttggtagaactggcaaaacgacagccccagcggcgtcatcaagccggtgacgatctcgccggtgtccattcgggagaaaaaggcccgttccttgatcgccggatcgctttcccacgggttagcgtaaagcatctgaaccggtttggcctgcgtggtgatcggccgcgcctgcaggagccacacgcgatcgtctttcaccgcccattcgatatccagttccgcgccgtaaatcatccgcgtttgcctggccagcctggcaagctgttgcagctgttccggggttaggctgggggcgtctcgcctgacttcaggcgtttgcagcagcgtgacccgtccctgcggatcgcgttggcaatagtgcggtttgtgacgaatttgccgctcgcggatctcgccgctcgccttatccaaaatgaagctgtcggtggtgacctgtccggagaccacgccttcccccagcccccagcagctgtcgatgacgatgtggttggcatcgcctgtcagcggatcttgggtaaacatgacgccggcggcgtctgcatccaccatgatttgcaagacgacggcgatatcgctctgcgccgccgatgtccggctatactgggcggcgcgttccgcccagagcgacgcccagcaggattgcaccttgcgcaccacctcgtcatccccgcgcacgtgcaggtaagtgtcgtattgcccggcgaaagagtgggtcaggccgtcttcttccagcgccgaagagcgcacggcgagcgaggcgccgtcgcccaactgtttgcaggcgtgacggatcgccagatcgagcggggcggggatggcggtgctcaaaatcatatcgcgcacgttgcccggcgcgcccgtgtcgagcagcgctcccggcacggcgaattcgataaactgccggtaagcctgcgcggtgatgcaaaacgccggcggcaccggcaagcccgcctgaatcaaatgattcaacgaatgggctttgccgcccaggcgatggggttccagcgttttatcgccggaaagttcaaccaccagggtaggattcatgacatcacctccgcaggcgtaacgggcattgcgaggcgttctctcaccgctttggcggcgttcagcccggctaacaccgcgctttcgatattaccgatgcccacgctgtcctgattggcgaagtgaatattctcaaacggcatgctggcctggtgaaacacgccctgagcctgttgtccggcgaccgaggtcaccagacccgcgggccagaaccagatttgaatgtcttcaatgatgtcggcgtcaatgcccatgttgcccagcactttggcgatttcgacataggtctgttgctgcagcgccgggaactcgttctgcgcggtgcgaccttgccgctctgggcgagtggtcggtttgagcagggttaataccccggtttccgcgctgaggtgattgtccatccaattggcgatcaggcaggtgccggctttgctccaatagtaaggtgtgcgggtgttttccggctcgatcagatagccgccgaacgagtgttcgaggatcggctttttcaacagcacgttcgccaggtagtaatcttcatggcggatctgacggatcgccgccaattgctctttgggcagggtgggtaaccaggtgggcacatgcgttttgggggctgcccagatcacttgtttggctctgatttcgctggccgcgccattgacgctgaaccggatcaccgtttcgtcgccgccgggcgtgatgctttgaagctgtacgcggctttgcagcctgacgttgttttgctcctcaagatagtcgagcagaccggcgctgatgctgccgttaccgcccggcagcgtgaccagattgccgcgtaaataccccaccaggaagtgcaatccgacataggcggagacttcgcgaatatcgagacattccacgcgcagcgtggtgctgacggcattctctaccagcttgccgaattttctcggtggccgcagatccgccgggatctgatccagtttgtgcggttcgaacagataagtgtacagcgggatagtgtcgagcagcgccatattcgccttgctccaggcgctctgcggcgtccagggcaggctggggtaccgctcgccgcgcggcgagaaggtatcgaggaaggcgtacagatcggcaaagatcggatcgcccagctgttttgccgcgataacataaggtttaccgatcaaggcatgcaggaatagttgtcccgtcaggcgccagacggcgggtttcagcaggtagaccggctgtttgagaaaaccaacgacgacttcacccaggcatcggagcagcaagaaggtatcgaaaaacaccagcgtgtccttttcattggacttgtaggcgccgctcagaccgattttcttcagcagttgcaacatgaacgaacccggcaatggctcctggaagcagacgccggcgatgggaaacttcaggcgattcaccgcgcggtagcgcgcgttgccgccaaaggaagcgcttttttccagcaccagaacccggcgttcggtcagttcgctggccgcggccaaaccggagacgccgccgccgatgatcaccacgtcatactcgccgtccagcgtgggggttaccgagccggctgacgccggcgtgggcgtggaaaagtcgcgcgtggggaacgtgcgtggcttgggtttgcggtggtgttgctgccgcagcatgtacagcgccgccagcgcgaaaatcgcatcgagcaatatgacctgcggctgggcgcggtgcaggatcgtgacaaatcccgccatcatcagcaactggcagtagatgatcaatgtcgtccaacgcgggttgaacatcaagaccgcaccggaggcaaacagcgccacgccgatcagcgcgttaaccgctgtaccctgcgccgccagccaagccgtcgccccggcgtaccaggtgccctggttcgccacggccgcctgctgcagaatatcggcgacgttttccaactgagggaaggctttcgccaggccggccaacatatagagcacggcaaaaacgcgttgaacgatcatcatgcgcctccccgcagacccagcttgcgggcgacaatttctttttgtatctcgttggtgccggagaagatccggctggggatcacgttcagcaagtggcgcaccagaccgagttcttgatccatgccggctccgccgaagatttgaatcgcgtccagcgcggactgcacggcatattcggaaatcaacagtttgctcatggcgatgtcgatctcggcatcctggccccgatcgtgtttccaacaggcgcggtagagcattagccgacactgttccagacgcagtttcatctcgatgatgcggttggagacggactgaaattggccaatcgctttgccgaattgtcggcgttgtttggcatagtccagcgcgctgtcgaacacgcgctccattgcgccgataaacagagccgacaggcagcctttttcccagatcattgaatcgtggaagatggcgccgccggcgcccggcatgccgagccgttgggcctctggaatgaagacgtcgttgaaggtcagttcgctccacgggcagttggagaggcaatctttcgggctgacggcgcctacgtttaagcctggcatccctttctcgagcacaaatgcggacacgcccataaagccatgttcgggatgggttttcgcatagacgatgaagatgtcggcaatcggcgcgttggtgatgaaaattttgtttccgttgagccggtagccgccttcacagggttgagcggttgatttcatggcataaatatcggaaccggcgtccggctccgtcgccgcattcgccgcgatcagttttccggccgccaacgcttcgagatactgcgcttttaatgcttcggaaccgaagcgggaaagcgggatcacgcaggcgcacagatgggcgcagagcgaaaaggacatgccgatgtcgcggctgcctttacccagcgcttcaatcatcagcgcagtatcgagcgcgctcatgcccaatccgccgaacgcggtcgtcacgggggctcgggtaaaaccataggcggcggcttgtcgccacaaatccaggcttaatacctgccgtgaaagccgatcatgcgcatcctgatccagcacctcgcgggcaaaacgctgagcggattcgcttagagcctgctgctcgcttgataagttaaaatccatgacgaactccgccatcgggttgagagattaaattagctaatatttctagtttggaggtggccaaaactcaaacaggcgcagtaatggcaaatgtaaataaatgtttatttatgtggtctattattacaattttgttaatttgtgtttttattttgttgttttaattgtgttttattttgtgttatttatacacaaaaatttacatataataaaaatcttaatttgatcaaattttaataggttagattgtctattgttttttgatgaatactttgcaggtgaagtatctatcttttggctgtggctatcggtttctcatcgctatcgacggtagggcgttgaggcttggtgagtggcggaaagcgtcttaagatagaaggtgagcaggagcattccggaggaaaaaatgaatattagcgacgtcgcgaaaaagaccgggttaaccagcaagacgattcgtttttacgaagagaaagcgctgattaccgccccgatccgcagcgataacggttatcgccattattccgccaggcacgttgaagagctgacgctgctgcgccaggcgcggcaggtgggcttcaacctggacgagtgccgtgagctggtggcgttgttcaacgatccggcccgccacagcgccgacgtgaaggcgcgcacgctgcagaaggtggcggagatcgaaaggcacatcagcgaactgggagaaatgcgccaacgcctgttgacgctggcggaacaatgtccgggcgacgagggggccgagtgccccatcatcaataatctggcgggatgctgtcgttcgaattaacggctgatggcgcggatcaccagcgtgaccccttccaccgccaccacttccacttcggtaccggcgggcagatcttccgccgcttgcgcgcgccagctgctgtcgccgatattgatgcggcccatgccgttgtgcatcggttccgtcagcgtggcgcgggtgccgatcagctgacggttgcgctggttgagcaccggtgaaccgccggacgcggccgccgggcgccggcgcagccagtaccaccacaggtaggcgacgacgacggtcaggacggcgaagatcacgccttgccattcccaggtgagcgtcggcagcagccagatcaaggcgccgaccaacagcgccgccacgccgctccacagcaggtagccgccggcgccgagcatttccgccgccagcaacacgcccccgagggagagccagaaccacagcggattcgccgcgatcagttcgagcatgattatttgcctttgctttctttcagcagttcggtaatgccgccgatcgagccgagcaggctgctggcgtccagcggcatcatcaccactttgctgttgttggaggaaccgatcttctgcagcgcgtcggtgtatttctgcgccacgaagtagttcaccgcctgaatgttgccgctggcgatggcgtcggacaccagctgggtggcgcgcgcctcggcctcggcggcgcgctcacgcgcttccgcctgcaggaacgccgactggcgttcgccctcggccttcaggatttgcgattgtttctcaccctcggcgcgcagaatggccgcctggcgcaccccttccgcctccaggatgtcggcgcgcttggttcgctcggccttcatctgggcgttcatcgaggcgatcagttccgccggtgggcgcacgtcgcggatctcgatacgggtgatcttcaccccccaagggttggtcgcttcatcgacgatgtgcagcaggcggctgttgatgctgtcgcgctgcgacagcatttcgtccagctccatcgagccgagcacggtgcggaagttggtcatggtgaggttgacgatcgcctgttcgaggttgctgacctcgtaggcggcgcgcgccggatcgaccacctggataaagcacaccgcatcgatggccacgttggcgttatcgcgggaaatcacttcctgcgaagggatgtccagcacctgctccatcatattgattttacggccgatgcggtccatgaacggcaccaccaggttcaggcccggcatcagcgttttggtgtagcggccgaagcgttctaccgtccattggaacccctgcggcacaattttgacgccggcgaacaccacaatcagcgcgacgacgatcacgatgggaataaaagtaagcatgcaaacctcctgtcagacatatgtaaacagatattacgccagcgcaggaaaaatgcctaccgataccgcgacttaatccagggcgctgaccaaacccgcgattaacggatcccgcgtctggaacaggctgatcagggtgcgcaccgcttcgccgccgcgagcatcggaccaggccagcgacaggggtgaaggttggcgcggatatctgagctgcttggccaccaattcgccgctatcaagataagtttggcacagctggcgcggaaggaaaccgatcccgagaccgcgcagatggcattccagcttggtgcgcagatccggcaccttgatctcctgctggccggacagcaaccaggcggtacgcttggccagatggcgcgcggtatcttcgacgttgattgcggcataagggcgcagctgcgtttcgttcaacggatcggcggcaacggccagcggatgcgtcggcgaaatggcgaacacccaatcgatcttgccgagcggcagcaccttgatgctgttttccagcgattcattgcccgccgcgccgatcgccagatggcaatcctcattcagcagcgcgtcccacacgcccatgtacacctggcgggaaatgtggaattgggtgaacgggtatttgtcgtgcaggtgagtcaacagcccggctacggcggcggcgtcgtacagcaggttgttgatcacgatattcacctgatgctctacgccatcgttgatttgccgcagttcgcccggcatggcgtccagccaggtgtgccactggcggcagcgctccagcaaatactccccggccggcgtcaggttgacggtgcgggtggtgcggataaacagctgcgtgccgatgctctcttccagcgttttaatgcggtagctgatggtggcggtggttttatgcagcaactctgccgcgcgcgagaagctttggcactcggcaactttgataaacgaacgaatggtttcgtgatccagcatgtggggtccttggctgacaccgccttttcggttatcggtgagaagaatctactgatgttgcgacacgataggcagcggcaaagcccaaccccacgatcccggtcacagaatcaccggatagcgatgagcatacgcagccctattcttgtcgatcgtggatcaggtgtttttttaattcattgatttcaagcaattaatatgggcttccgatcgtgaaatgtgcggacgatcttgttatggaaaaattttccaaaaaattgctgtcaaatttgccatgcgctgtctagagtgaaggcgttgggtgaaatatcgccgtttaatcgtcgtctgggtcatgcgctttggagaatcacatggatttagtcatcgaagaattaacgccggcggcctttgcgccttatggcgatgtattgcagatagaaggttcgcgtttctttcatatcaatgacggaaagaccgagcgttatcacgatctcgccaagattgaggtgtcggacggcaaccgggtgctggccagcatcaaccgggcggaaccctgcgagctgccgatgaccttttccctgctggaaaagcatccgctctcgtcgcaggcctttgtgccgatgaacggcgaacgcttcgtggtgatcgtcgccgaaccgggcgaaacgatccccgttggcacgttgcgcgcctttatcaccaacggcaaacaggggatcaactatcatcgtaacgtctggcatcacccgctgttcgcctatgcgaaagtcaccgactttttcaccatcgatcgtgcaggcgccgacaactgcgtagtcagccgcttgccggagccgtatcgcatagttttggcatagcgctggccgcacgccgcgcagggcgtttatcatagcgtcacccatgccgtcactgacaaaggaagcttgaatgaccgaattacgcaggaaaggacgacccgccaccgaagccggcgcgaccaaaggggcgcaggcgttggatcgcgggctggagatcctccagtatctggccaacgccgggggaagctcgtcggtttccgtgctgtccgaaaagctggagttgccgctgtccaccaccttcagattgttgaaagtgctggagaaatcggaattcgtctttcaggatccgcagctgggctggtggcatatcggcattcagtcgttcaccgtcggctccgcttacatgaacgatcgcgacgtggtatcggtagccgggccgttcatgcggcggctgatgctgttgtccggcgagaccgccaacctggcgatccgcaacaatttcgacgcggtgctgattcgccaatgcgaatgccaggcgatggtgcgcatgtgcgcgccgctgggcagccgcttgccgctgcacgcatcgggcgccggcaaggcgctgctgtatccgctggcggaagaagagatgctggatctgatcgtgcgttcggggctgcaatcctatacgccgaaaaccctgaccagcgtgaacctgctgcgcaaggatctgcatcagtcgctggagcagggctacaccatcgacgatgaagagcacgcgctgggcctgaactgcctggcttcggcgattttcgatcgcaacaacaacgtgatcgccgctatttccatttccgggcccagttcgcgggtcggcaaggagcggttcaaagagctgggtgaactggtgggggaagtggccagagatatcagcgccgcgctgggtgaatcgcgcagcaaggcgtaatcgtcgcgtgccggggtgagccggcgcggaacaagactccccgtttgatgagcagacgggtttttttgacggcatttcaaagttggaaaaattttccaataaattaaggagagcatcacatggcaattatgcgagcggtagacgcggcaatgcacgtgctggaaaaagaagggatcaccaccgcgttcggcgtgcccggcgcggcgattaacccgttctacgatgcgatgcggcgacacggcggcatcaaacactatctggcgcggcacgtggaaggggcctcgcacatggcggaaggttatacccgcgccgccgccggcaacatcggtgtgtgcatcggcacctccggcccggcgggcactgacatgatcaccggcctttactccgcctccgccgattcgattccgatcctgtgcattaccggccaggcgccgcgcgcgcgtttgcacaaggaagattttcaggcggtggacatcgagtcgatcgccaagccggtgaccaagatggcggtcaccgtgcaggaaccggcgctggtgccgcgggtgctacagcaggcgtttcacctgatgcgctccggccggccgggcccggtgctgatcgacctgcctttcgacgtgcagatggcggagatcgagttcgatccggacacctactcgtcgctgcccgcctataagccggcggccacccaggcgcagatcgacaaagcactggatctgttgtgcgcggcgaaaaagccgttgatcatcgccggcggcggcattcacaacgccgatgcggcggatctgctgcaacggctggcggagatctgcaatgtgccggtgatcccgacgctgatgggctggggcgccattccggacgatcacccgctgatggcgggcatggcgggcctgcaaacctcgcaccgctacggcaacgccaacctgctggactcggatctggtgttcggcatcggcaaccgctgggccaaccgccacaccggttcggtggataagtacaccgccgggcgcaaggtggtgcatattgatatcgagccgacgcagattggccgggtgatctgtccggacctgggcatcgtttccgacgcgcgcatcgcgctgcaaatgctggtggacacggcgcagcgccgtttcgaacgcggcgagttgccgaatcgcgacgcctggtgcgccgcctgcctgcagcgcaagcaaacgctgctgcgcaagacccatttcgacaacgtaccggtcaagccgcagcgggtgtatgaagagatgaaccgcgccttcggccgcgacgcctgctacgtcaccaccatcgggctgtcgcagatcgccgccgcacaaatgctgcacgttttcgaaccgcgtcactggatcaatgccggtcaggccggcccgctgggttggacgctgcctgcggcgctgggcgtatgcgccgccgatccgcagcgcaaggtggtcgcgctgtcgggcgactatgatttccagttcatgatcgaagagctggcggtcggcgcgcagttcaagctgccgtatatccatgtgctggtgaacaacgcctatctggggctgatccgtcaggcacagcgcgggttcgatatggattactgcgtgcagctgtcgtttgaaaacatcaacaacgcggaaattggcgagtacggcgtcgatcacgtcaaggtggcggaaggcctgggttgcaaggcgctgcgggtgttcaaaccggaagagatcgcgccggcgttccgtcaggcccaggaactgatgcggcagcaccgggtgccggtggtggtggaaatcatcctggagcgcgtcaccaatatttccatgggcaccgagctggataacgtcaacgagttcgagccggtggcggcaacgccggaagacgcgccgacctcggtcaacttctttgattaccgctgaggagccttaccatgccgaaattttcagccaacctgtcgatgctgttcactgaagtcgattttatgcagcgtttccgccgggcgaaggagcagggcttcagcgcggtggaatacatgttcccttacgactatccgatcgcggcgctgcgcagcgaactggaggcgcaccgtctgagccaggtgctgttcaacctgccggctggcgactgggcggccggcgaaaggggcatcgcctgcttgccggggcgcgaagcggagttccgcgacggcgtcgggcgcgcgatcgagtatgcgcaggccctgggctgcgatcgcatcaactgcctgatcggcaatccggatccagccgtcagccgccgcaccaccgacgaacgggtgaaggagaacctgagctacgccgccgacaccctggcgcggcaaaatattcgcctgctgatcgaaccgatcaaccgctacgacatgccgcagttctacctgcaaacctcccggcaggcgatcgaactgatcgaggcgatcggcagccccaacctgtatctgcagtacgacctctaccacatgcagcgcatggaaggagagctgacgcagaccctcgagcgcctgctggcgaggatcgaccacatccaggtcgccgataacccggggcggcacgagcccggcaccggcgaaatcaactgcgagtttatcttcgcgcagctggatcgcatggggtatcgcggctggatcggctgtgaatacaaaccgctcaccaccacggaaagcggcctgtcatggattaaaaaatacctgtcttgaggagatgaaaatgaaagtgggatttatcggtctgggcatcatgggcgcgccgatggcggaaaagctgctggcgggcgggcacacgctttacgcccacacccgacatgaggtgccggcaacgttactgcaacagggggccatcgcctgccgcgatccgcagcaggtggcggatgaggcggacgtgatcttcatcatggtgccggatacgccgcaggtggaagaggtgctgtttggtgaacgcggctgcgccgccggcaagctgaacggcaaagtagtggtggacatgagctccatttcaccgctggagaccaaagcgtttgcgcagcgcatcaaccagctgggcgcccagtacctggacgcgccggtttccggtggcgaagtgggcgccaaacagggcacgctgaccatcatggtgggcggcgagcaagcgaccttcgaacgggtgcaaccgctgctggcgctgatgggcaagaacatcacgttgatcggcggcaacggcgacgggcaaacctgcaaggtcgccaatcagatcatcgtggcgttgaccatcgaagcggtcagtgaagcgttggtgttcgcctcgcgcgccggcgccgatccggcccgggtgcgtgaagccctgatgggcggcttcgcctcgtcgcgcatcctcgaggtgcacggcgagcggatgatcaagcgggcgttcgcgccggggttccgcatctcgctgcaccagaaggatctcaatctggcgctgcagggcgcgaaggcgctggcgctcagcctgccgaataccgccacctgccaggagttgttcaacgtctgcgccgccaatggcgacggcgaactggatcactccgcgctggtgcgggcgctggaaatcatgggcaaccaccgggtagccggctaaggcgcccgccggcgtttcattcgccggcttatcattagaatcagagatgttcgacattaataacgccctctttatgataaataaagagggtccccgccaatccaataaaaaatgattcagcacaataaaaagtaaaaagcaggatgccaacccaaggagacactgaatatggcaaccgataatgctgttattgacaaagatattcttaccgcccctgacaaaaatcgtttatatcgaaaaatcgcctggcgcattatgcccattctactagtgagctatatcgtcggttatctcgatcgggtggggatttcgttttcgaaattccaaatgatgcccgatattctgaacggcaatgtctcgatggccgaagccgtttacgggctgggggccggggtatttttcatcggctatatcatcgccggggtgcccagcaatattctgctgagccgctacggcgccagaaagatcatcgcgctgctgatggtggtgtggggggcgatttcgatgctgagcatcttcatcaccaacccctggcaattctacctggcgcgttttctgctggggctggcggaagccggcttttaccccggcgtgatcctctacctgacgctgtggttcccctccagccagcgcgccaagatgacggcgctgttcgtgtgcggcatcccggtcagcaacatcatcggcggcccgctgtgcggctggatcatcgaacacatgaacggcctgatgaacctctccggctggcaatggctgttctttatcagcggcccgcgcgcgctgttgatcgccatcgtcattttttgcttcctggataatacctatcagagcgccaagtggctcagcccgcaggagaaggcgctgatcaaagaggatatggcgcagagcgcgccgcgtcagggcgccgccggcgggcaggagtggacgatgaaaagcatgctgaggtcgtccgcgttcaccaaaatgtggctgatttgcttctgtacggtgatggggcaaggcgggctggcgttttgggtgcccaccatcattcgcgacaccggcgtgacctcggtgatggatatcgggctgctgaccatgctgccgtatatgctggcggtggtggcgatgctggtggccgcgcgcagttcggacaagcatcgcgagcggcgctggcacattatcgtgccgttctgcatcgcggcggtgtcgctgatctttatcggcctgttcccggacaacaagcatgtggtgatggcggcgctgtgcgtggcggtggcctcgagcctggtgccgtcgccgctgttctggagcttgccgaatgccatctttaccggcacctgcgccgcagcgggcattgcgctcatcaattccatcgccaatatcggcggatttatttcgccttacatcatcggctatttcaaacagctgacccacagtaacttggcggcgatgtgcgttttgtcggcgatgatgatcgtgggcgcattattgacctacagcgtgccggcgaaatgggtcaataaataacgcttttcttcatcttaattaaacagtcggcaacagttttattttattccgccatgcgttcttcatctgattaattcagcgggggaaggcatggccgtttttatttccgttcgaataaaggatgcgtcatgaaaattgttattgcaccggattcatttaaagaaagcgtcagcgcggaattggcggcgcgggcgatcgcgcgcggctttcacgaggtttatcccgatgccgagtgcgtttgcctgccgatcgccgacggcggcgaaggcacggtggacgcgctggtggccgccaccggcgggcgcaaggtgagtgtgaccgccacgggcccgctgggggaacgggtggcggcgttttacggcgtcagcggcgacggcaagacggcggtgatcgagatggcggcggccagcggattgatgctgacgccggcggaacgccgtaacccgctgctggccaccagctacggcaccggcgaactgatcctgcatgcgctggatcagggcattcgccacctgatcctcggcatcggcggcagcgccacggtggatggcggcgtcggcatggtgcaggcgctgggcggccgcttttatcgtccggacggcagggcgctgccgtggggcggcggcgagctggcgacgctgagcggaatcgatctcggcgcgctggatgcgcgcctgcggcagtgccggatagaggtcgcctgcgacgtagacaatccgctggtggggccgcgcggcgcggcggcggtgttcgggccgcagaagggcgcgacggcagcgatggtggcgcagttggaacagggcctgacgcagtatgccgaggtgatccgccagagcaccggccgcgacgtgcgacaggtcgccggcggcggggcggcgggcggcatggggatcgcctgccaggtgtttctcggcgcaacgctgaagccgggcatcgagatcgtgatggcggcgctggggctggagctggcgttggcggaggccgatctgctggtcaccggcgaagggcgcatcgacagccaaacgctgggcggcaaggcgctgtccggcgtcgcccgtctggcgcgggcgcgcggcctgccggttatcgcattggccggcgtggtggaggaaggggcagaggcgctgcacgcgcaggggatcgacgcgatgttcagcattttgccgcgtctgagtacgctggaggttgcgctgtcgcaaggcgagcttaacctgcagcgcagcgccgccaacgtcgcccgcgcgatgcgcgtcggccagcgattgggataaaaaagaaggccacgctgcgcgggcaggtggcctgggttttggcggcgaagcgcttacggctcgacgtcgcggttgcaatccttggagtagatgtagctgaaggtttcctggcccaccgcatagcccgcctgctgcacataggcgcccatgaagatgtagtcgccttgcttcaccggcatccattcattgtccaggttgtacacgccggcgccgctgagaatataggcgccatgctcctgcacgtgggtctcgatatagccgtggctggcgccgggggcgaaggagaggatgtgcatattcatgtcgaagcccagatctttcggcagcagatcctgcaggatcacctcgctcatgccctcgtagtggatctgctccaggttggcgacgttgttgctgaccacgtgcgcctcgtagcccttgatgcgctggtagcggcgcttgtagaggaacaggcggctggattggccgccgttggcgttttccagccgcatcgtgacgcccgccgggcagtaaaggtagccgccggcgctcagcgggtaatcggtggcgtcggcggaagcggtgatggcgccgtcgatgacgtacacgaaggtttcgatctcttcgccgccaaagcctttggtgttgcggccgcagtcgtgcagcgtcaccagataatcgacgaaggtggcgcccagtttcggcgtcgacaagatggtgacgtcgcagttttcaaaaccgggaatgacgttgcgcaccaggccgttcggcgggatcagcgcatagttgccgcgtttgatgatggcgcgcgttgacagaatgtcggttggataaccggtttgattgttgaagtaacccacgttgattctcctgatcgttgaaagggcgccgcggcggcgcccggtaaaaaagcgccgtcaggcctcggtggccgttcgggttggcgtagtgcgtttcatcaagacattgacggtgaagaaaatggcggtgcccaccagcaggatggcggcggagatgtaaaagcccatcaccttggagccggtgctgtcggagatcacgccggtgaggaagggggcgatcaccgacgaggacatgccgaagaagttgaacacgccgaagctggtgccatagcctttcttcggcgcgttgtcggcgacgaaggagatcatgatcggatcgaccgccagcttacccaacagcccgtacaggatcaggctgatcagcagcatggtggagtccggcgaaatgacggtgcagaccagcattaccgccgcgcacagctcgaggaagatgatcagctgcaccttcttgttgcggaaacggtcggacatgcggctgaagaacagcgcgcccggcaccgacgcgaaggccaccagggcggaggagaagccgatggctaccccttcaaagccgcgctcttgctgcaggaacgagggcagccaggtgactatcatgtagtagccgtagcaggtggcgaagtacatcgcgtaggcggagatcatgcgcaggctgaacaggccgctggcctgaccgtcttcttcgggcgcgagcgccgccggcgcaacggtctggctgacggctgccggcgtttgaggctgcgagcctttgatgaccacggcgaacaccagcgtcatcaccaccagcaggccggtgatgatgaacagcatgatctgccagttcatgttgaagcttttcaccagcaggctggaggcgatcaggccgatggccatgccgagcgccgagccgctgttgatcaccgcggtcgccaggccacggcgctccagcgggatattctccgacgacagggagtaggccgagccgtaataagagccgcaacccatgcccgccagcaggctgccggcatagaccatggtcaggctggtggcgttgccgatcagcaaggtggcgatgatgaacaggcagaagcccgggatcaacaccaccttcttgccgaatttgtccaccaggatgcccgccgggatctgcatgccggtataggcgaagaagtagaagctggcgatcagccccatttccgcattggagtgcgcgccgatggtctgttggatctcgggaaagatcggcgtcagaacggtgcggtagatccagatcaccgcccagcccaggcagagcacgacgacgatctttttccagtagcgcgggtcgatgtcgttgctcatgcctcggccccctgttcggtgtaggccagctgatacagcgtctgcgccaggattttcaccccttcgttcagatcggcgacggcggttttttccgccgggttatggctgatgccggcgatgctcggcacgaacatcatcaccgtcggcacgcgcggggcgaaaatttgcgagtcgtgcccggcgccactgtgcatcatgcggtaattcagccgctgcgtttcacacaggcggctgacgcaggccaccagctgttcgttcatcgggatcggcgcttcgtccatccacagatcgatctcggcctcgatgcccatctcggcgcagatgcgctggatatcctgctcgatctcctgcgtgaagcgcagcagcgcggcctgatcggtatggcggcagtcgagggtgaagtgggtgaagcccggcaccacgttgacggtgttcggcttcggctccaccttgccgaaggtcagcaccagcggatcgccctcggcgcgcgccttggcgatcgattcgcagcagatgcggctgaaggcgtgcacggtatcccggcggtagctcatcggggtggtgccggcgtggttggcttcgccctgcagacgcacgtcatagcgccgttggccgacgatgctggtcaccacgccgatggttttgccttcggtttccagcactttgccctgctcgatatggatctcgacgaaggccgtgatatcactgcgcagcggctgatgcggcggcgggaaatcgaaaccggcgtcgcgcatggcgttgacgaaaccgacgcccttggcgtccgtaatgtgctgcacatcttcccgccgggccaggccgacgatgttcttgctgccccagaacacataggggaagcggctgccttcttcttccgccagcgcgatgacttccagactgcgcagcggcgggccgtaggtatccttgaggtatttgatcgccataaaggcggcttcaatgccgaactggccgtcgaggttgccgccgttgaccaccgtatcgatgtgcgaaccggagagaattacctggtcggggtatttgctgccctccagccgcccgaacaggttgccgaccgcatcaaaatgggtgctcagcccggcggcgtcgaaggcgtttttcaacgcgtgctgcgcctcgatccattccggggtataaagcagacgcgtcatgccgccgctggggtcggcgccgattttcgataaccagccggaaatatcacggatttcttgttggaagtctttcatgtttacctgcccgcatgttatgtctcagcggcgatgcggccagggcggatgatattcgccgccggccgacctattgcgctgagcgcgctgatgaaggttttcttttttctccccggctctgaaatatcaaccgcgagccgcggcgtaaaaagcccacgataataagattgcgttaactggcgaaggggtctttgtgatcgtaagaacgctggtaaatagcatttgaaattaagtattgataaatatcgtcgacgatttcgataccgtttttctcgctttccatttcacgcgcatggctgttctgtcccgggtaaagcactttactgacgcccggcgccggtttaacggcgttcaactctttcatgacctggctgatatttttacggaacgccgattcgttggtgaaataacctgggttcaggacgatatgcaattggcccaattcccggccggcgctaagatcgtgatacatcgagctgacgtgtttgccgaacggcaggccgagcaaaatgcccgacagcacgtcgaccatcatcatcaggccgtagcctttcggcccggcgatcggcagcagcccgctgacggcgaacggatcggtggtgtgcttgccctcggcgtccaccgcccaggtgtcgggaatggcggcgttgcgcgagcgggcgtccagcactttcccccaggcctgcacggtggtggccatatcgaaggtaatcagctcgtcgccttcgcctggtgcggagaaggcgatagggttggtgccgtagtagacttcggcgccgccgtacggcaccaccatcggatcggattggcacagcgagatgccgaccatgccggcgcgcgccgcctgctgcacgaagtacgacagcgcgccgctgtggccgatgcggcgaacgcccaccaccgcaacgccgttctctttcgccatctcgatggcgcgatccatgctcagcttggccgccacgtgcccggcgccgttgtcgccgtcgaaaatggcgctgcaggggccggttttttcaaaggtgaaatggggatgattgttggtgccgcccttgctgatgcgttcggaatagtattcgaccctgaccgcgccgtgggagtggatgccgcgcgcatcggcatgaaccagcacgtcggcgacgatgccggcgtgctcctggctcaggccggcggcgtgaattttttgctggataagctgatgcaattgttgtttagagaccttcatatacagtccttttatcactacggtttatttaattcgcctctgcgttgtaatgtataaataccgggggggaataatgtgatccagatgcgttttattctattgaattaaaaattcgtcgaattaaatcgtcattgttagaagttttttataaatgattttctcacgtctggattaactaatattcagacgattaagttattttttctaacaatgaataaagtgtgaccgcactcacctctgggcgtgattttaatttgtagcttgataattaaccttttcgctggattcaatgcatcgccgcgccgccggtgcgggaaatattgccgatattattaaatgctgtcgtaaggatatcaccatgatccatgcttttattaaaaaggggagctttcaggattccgtcagcctgatgttgatctcccgcaaactcagtgagtctcccaaggttgaggaaatatccgtcatgatggggacgccggccaataaatccttattggaggtgaccggtttctggcatccgcagtttagccaagcgacgccgaacgatatttgcgtggcgatcaaagcggagtccgccgacgagtcgatcgccgaggagatcggcgcggcgctggaggcggcgctcaaggcgattgcgcagggcggccagggcggtaaaaaactgctgcgggcgcgcagctggcgcaccgcccggcagaagctgccggccgccaatctggcactgatctcgatcgccggcgaatacgcggcggagttggcggatcgggcgctggaagacggctgcaacgtgatgatgttctccgacaacgtcagcccggcgcaggaagtggcgctgaaaaccaaggcgcgcgagcgtgggctgatcgtgatggggccggactgcggcactgcctgcatcgccggcgcgccgctggcgttcgccaacgtggcgcccgccggatccatcggcgtggtcggcgcctccggtaccggcattcaggagctgatctcgcaaattaccctggcgggacagggcatctcgcacgctatcggcctgggcgggcgggatctgacggcggagatcggcggcatcagcgccatcagcgcgctacgcatgctggcggcggatccgcagagccaggtgctggcgttcgtgtccaaaccgccggcgcccgaggtgcgtcagcgggtgatcgacgaaatgaaagcgctcggcaagccggtggtggcgctgttcctcggcgcgcagtccgccgtgcgtcaggatggcaacatcacgttcgccgccacgctggatgaagcggcgcggctggcggcgatgctgggctgcgtgcagcaacaggcggcgcaacagcccgcggtgcccggcggcaaaatcgccggactgtacgccggcggcacgctggcggccgaatgcgcgatgttgctggcggaaaaactgcgcttgccggtggatagcgaacacccgcgcggcgccatgctggtggccgacggccatcgcatcatcgacatgggcgatgacttttatacccaggggcgcccgcacccgatgattgatccgaccgcccgcaatcaagagatcgcccgcctggcgcagcagccgcagaccggcgtgttgctgctggacgtggtgatcggctttggcgcccaggacgatccggcggcgtcgctggcggacgaggtggccaacgtgcgcgcggcgcgcggtgcggcccacccgctggcggcgatcgctaccgtcaccggcaccgaacaggatccgcagcagcgctcgcggcaaatcgccaccctgcaggaggccggcatcgcggtgatgccgtcgctgccggcggcggtcgcgttggcgcatcagctgattacccccgtcttacccgcacctgaacgtgaacggccgaccttgctggacggcgtcgcggtgatcaacgccgggctgcgcagcttcgccgatgacctgcaaaccagcgacatcccggtggtgcattaccagtgggcgccggtggccggcggcgatcaacgattagccaacatcttgaaaaaattaaagtaaggaaccgctatgtacgcaacgattgagcaagcaaacgccgccgttatcgcccgtatccgcgaggcgcgcccgcactggcaggatgtggatctggcgcatcggttgatcccgcagctggctgaaggacgcaagctgctgcacgccgggccaccggtcacctggcaagagatgagcggtccggtgcgcggtgcctgcatcggcgcctgcctgttcgaaggctgggcgcaggatgaacagcaggcgctggcgctgctggagcaaggggaaatcgagttcatcccatgccacagcgtgagcgcggtggggccgatgggcggcatcacctcggcccacatgccgatggtggtggtcaggaacaccgtccacggcaactacgcctactgcaacatgaacgaaggcatcggtaaggtgatgcgcttcggcgcctatggcgaggatgtgcagcagcgtctgcgctggatgcgcgactctttggctccggtgctgaaagcggtgctggcgacgctggaggaggggatcgatctgaccgcgctgatggcgcaggcgatcagcatgggggacgaattccaccagcgcaatatcgcagcctcagcgctattgatgcgcagattggcgccggagattagcctgctgcctcgcgataaggcggagctggcgcaggtgatgcagttcctcagcatcaccgatcagttcttcctcaatctggcgatggcttactgcaaggcggcgatggatgcgggagcagaaattgagcagggcactatcgtcacggtaatgacccgcaacggcaagaactttggcatcaagatcagcggcatgggcgatcgttggttcaccgcgccggtcaatacgccggaagggctgttcttctccggcttcagccaggcggacgccaacccggacatcggcgacagcgcgatcaccgaaaccttcggcattggtggggcggcgatggtcgcggccccgggcgtgacgcgtttcgtcggggcttccggcggcatgagcgccgccaccgacatctccgaggaaatggcggagatctatcttgagcgcaacatgatgctgcagatcccgacctgggacttccagggcgcctgcctggggctggatgcccggcgggtggtggaaaccggcatcacgccgctgatcaacaccggcatcgcccaccgcgaagccggggtcgggcagatcggcgccggcacggtgcgcgcgccgctcggttgtttcgagaaggcgatcgaagcgctggccgataagctcggcatcacggcgtaagtgaacggaggggcgtatggacattgtcgcgctggccggcagccgccatgtgacgcaggactatggcgcgctgcgctgcgtcggcagcttcaacaacgcgatcaatttcctgacggaaaacgcgcggttgctgacgctacaccgcgccggcagcggcctgagtccgatgggatggcagctcggcgcgcgggatttcgaccgcgtgcgtcatgcgatgccgtccgtacggcactgcgctttctccaccactggcattttgctggatgcgcttcttgtccggcccgccgcgacggcgcgggatctggggctggcgcagcgggcggccattgccgatcggccgctggcggcggtattgcagcgctgcacggcgcagtgcgggttgcacggcgaaatcggtcggctggtgaagcggccgttaacgccggagccggccgggctggcgcgggatttctcccgttggttgcggggcggcgcggtcgactggcgccatacgctgggcaaagggccggggctgacgccgagcaacgacgacaccttgctcggtctgttgctgagcgcgcaccttgacagccgcatccaggtcgccgggctgacgccgtttttcgcccagacgccaccgctggaagcgttgaccacgctggtgagcgcgcactacctgcattacgccgagcggggcgtgttcgccacgccgctgcatatgctggcgcaggggctgcaggtacctaacggtgtatcggcggcggtggcggcggtgctgaacctggggcatttctcgggggcggacacgctgctgggcgtatggctgggggtgacgacgattaacgcactgtgcggcgcgcggtgtgaacatgagggccggatcgcggatccggccgggacggtatgatttcaactacgggtgcaaaccatgaaaaccttggtcattgcgttgggcggcaacgccttgttgcaacgcggagccgtgctctctgcggaaaatcagtataagagcatcgccctcatcgccgacgccatcggcaagctggcgcagaaataccgcatcgccatcgtgcacggcaacggcccgcaggtggggttgctggcgttgcaaaatctggcgtaccgcgatgtgccgccctatccgctggatattctggtggccgaaagccagggcatgatcggctatatgctggcgcagcagctgaatgccagccatccgcagcagccggtgtccacgctgctgacgcgggtgctggtggatgcgcaggatgcggattatcaggcgccgagcaagttcatcgggccggtgtatgcgccggaacagcggcaggcgctggaggccaagttcggctggacgctgaaggcggacggcaactatatccgccgggtggtgccttcgccggcgccgcaaaagatcctcgacatcgaggcgatcaccttgctgctgtcgcagcggcatatcgtgatctgcaacggcggcggcggcatcccgatgatcgccggcgagcatgggctgactggcagcgaagcggtgatcgacaaagatctggcggcggcgctgttggcggaacaggtgggggccgatcatctggtgatcctcaccgacgccgacgcggtgtaccaggagtggggcacgccgcgccagcgcgccattcgtcgcgccaccacgcaggagctggcgccgatggcggtggcggacggcgccatggggccgaagatcatggcggtcagccgcttcgtcgatcgcaccgggcggacggcgcatatcggtggcctgcaggatatcgacgcggtgctggcgggccaggccggcacctctattttaccttagctgccttcggtttatccgcgcccgcgttggcgcggataagtatgcctaaatggcatgatttcaataatttttattcatttcatgatgttgctcgccttggctagagtaaaaacacccccgtgtttaccgtcaaaaatttgtcatttttatttgcgactatgctttttgaaatgacatttcggccaaggattgttatggattcgctcagtgttgatgaactcgcccagaagaaagaccgctggtatcgcattgtagaggagatgctggccgaagccggcgtcgccatcaacggcccgcgcgcctgggatatccgggtgcataacccggcgctgttcaaacgcattttgcaggaaggctcgctcggcttcggcgagagctatatggacggctggtgggaatgcgaacggctggacatgctgtttacccgcattttgcaggccggcgtcgatgagcggttgccgaaaagcctgagcgacatcgcgcgcatcgcctatgcccgactgttcaaccgccaatcgcgcaagcgcgcctggcaggtgggcaaagagcattacgacatcggcaacgacctgttccgggcgatgctcgatccttacatgcaatactcctgcggctactggaaagaagcgcaaacgttggagcaagcgcagcaggccaagctcaggatgatctgcgaaaaactgcagctgaaaccgggcatgacgctgctggatatcggctgcggctggggcgggttggcgcagtttgcggcgcaaaactacggcgtctcggtgcacggcgtgaccatttcagccgagcagcagaagctggcgcaggcacgctgcgccgggctggacgtcgagatcttgctgcaggattaccgcgatctggatcgtcagttcgatcgcatcgtgtcggtcggcatgttcgagcacgtcgggccgaaaaactacgagacctatttcagcgtcgcggcgcgtaacctgaagcccgacggcctgtttttgctgcacaccatcggttccaatcaaaccgaccttaacgtcgacgcctggatagacaaatacatcttccccaacggctgcctgccttcggtgcggcatatcgccgaggccagcgaagggcgtttcgtgatggaggattggcacaacttcggcgccgattacgatcgcacgctgatggcctggctggagaatttcaaacgggcgtggccggaattggcgggcggttattccgagcgcttcgagcgcatgttcacttattacctgaacgcctgcgccggcgcgtttcgttcgcgcaacattcagctgtggcaggtgttgttcagcccggcgggcgtggagggcggggtgcgggtctatcgttgatatccctgcgtcttttccgccgcatcgttgttggctgcacgttcgatcccctggtcacttagttatctaagctcccagggcttctcacgtttgccgcctggatgcagcttcaggtatgacggatatcagtacagcagggagtacagctggcggcgatatttagcggccagcgcgtcgccggtgccgagtgcggccagaatgtccatcagggtcttgcgcgcgttgccgttggcggcggccagatctttcttcagatgccccatcagcagttccagcgcttcttcgttacgcccgacctgatgcagttgcagcgccagctgcaccgccagctcgacgttgtccggctcttgctgcacctgctgttgcagctgttggatttccggcgtgtccgccgcctgcttcaacagttcaatctgcgccaccaggccctgatagcgcgtatcgcgatcctgcagcgggatagtcgccagcaccgcttcagcgtcttcgctgcggctgagcgcgatctgcgtttcggccagcgtcaggccgatgtcgctgcgctgctggctgctctgccaggcgtctttcagcagcggcagcgcttcggcggcgttgccggcggccagcagttcctgcgcctgcgccagtttcagatcttcttccttcggcaggaaacgctgcagcaggtcacggatcgcttcttccggctgcgggccctggaagccgtcgaccggttggccgtctttaaacaggtagaccgtcggaatggaacgcagcccgaattgggaggcgatcatctgttcggcgtcgcagtccaccttggccagaatgaactgaccggcgtattccgccgccagcttgtccagcaccggcgtgagctgcaggcagtgttggctgcgctcggaccagaagtagaacagcaccggaatggacatcgactgttccagcgtctggtgcaggttagtttcgttaatatcaacaacagcttgagctagcatcttttttctctctgatcgtgcggagccatggggtgtaaatgggggcgcgccgccattcttcaaccccgtcgggcgaattaagcgttgctgcgcagcagccaatccagacagcggcccggcaaaatgcggcgcagcacgctcatcgcgtgcgccagcagggtgaccggatagcgcagtttggcgcgcgggctttccagcgcgtggcgcagtttgggtagaatggcctccggcggcagcgtcaggcgcttggcgatgccggggttgtgcaccggcttgtcgctctgcgcctggttgacgttctggctaaagtgggtggagatcggccccggttcgatcaggctgacctgaatgccgctgccgtgcagttccatgcgcagcgcgtccgaccaggcttccagcgcgaacttgctggcggcgtaggcgccgcgcccggcgctggagaccagacccatcaccgagctggtctgaataatacgcccttcgccgtgcggcaacatcgccggcaacagcagctgggttagctggtgggtgccgaacaggttggtggcgaactgccgctccagctggctgcgcgaaatgcggctgagcgggccgtaaacgccgaaccccccattattgaacaggccgtacaggcggccgtcggtcagcgcgatcacctcggcggcggcgcgctcgacgctggcgctgtcgtccagatccagctcgatgccttccagcccgagctggcgcatgttttccacgtcctgcggcttacggcaggcggccagcacccggtagccgcggttgcgcagatcctgcgccgcaatcaatccaatcccgctcgaacagccggttattaataccgctttttgcataactttacctagtgtacgaccctaatttagtgagactcatgctttactagcggttccaggcgctccgccatccaggtggcgataaacggctgagcgtccccattggggtgcaatccgtcatcctgcatccattccggcttcaccaccacctgttccatatagaacggcagcagcggaatgttgaactgtttggccaacgccggatagacggcgctgaacgcctcagtatagcggcggccgtagttcggcgggatgcggatctgcatcagcagcggctgtgcgccggcctgctgcacccgcgtgatgatttggccgagatcgcgctgtacgtcctgcgccgggaacccgcgcaggccgtcgttggcgcccagctcgatcagcacccagcgcggccgatgttgtttcagcagcgcgggcaggcgtgccagcccctgcgcggcggtgtcaccgctgatgctggcgttgaccagctgtggcgcgcccggctttttttgccactgttcggccaacagcgtcggccaggcccgctcgatcggcaggcggtagccggcgcttaaactgtcgcccaaaatcaacaaggtatcggcggcggcagcgcgtaaactgaataatcccaacagcaaaaggaagggaagatgccagcggaaaacgttcttgaagttcatcatcttagtaaacacgttggtcagggtgagcatcagctcaccatccttaccggagtcgagctgcttgtcaaacccgcgcagacgatcgccctgatcggggaatccggctcgggcaagtcgaccttactgggcatattggccgggctggatgacggcagcgaaggcgaagtgcgtttgctgggcgagtcgctgaccgcgctggacgaagaggggcgtgccgcgttgcgcgccagaaatgtcggcttcgtgtttcagtcgttcatgttggtgccgacgctgaacgcgctggagaacgtgcagctgccggcgttgctgcgcggcgagagcgacaggcagagccgcgagcaggcggtgcagctgctcgagcagttggggctgggcaagcggctcgatcacctgccggcgcagctgtccggtggcgagcagcagcgcgtggcgctggcgcgcgccttcagcggccggccgcgggtgctgttcgccgatgagccgaccggtaacctcgatcgtcaaaccggcgatcgcatcgccgatttgctgttctctctcaaccgcgatttcgacaccaccctgatcctggtgacccacgacgaaaccctggcggcgcgctgccagcggcggctgcggctgcgcgaaggcaagctgtgggaggaagcatgatctggcgctggttctggcgcgaatggcgctcgccgtcgctgctgatcgtttggctggcgttgacgctctccgtggcctgcgtgctggcgctgggcagcatcagcgatcgcatggacaaagggctcagccagcagagccgcgattttatcgccggcgatcgggtgctgcgcagcgcgcatccggtgccggaaggctggctattggacgcgcagcagcaggggctgaaggtgagccgtcagctgtcgttcaccaccatgacctatgccggcgatcggccgcagctggcggacgtgaaagccaccgatttggcctatccgctgtacggcaagctggaaacgcgcccggccaacatcaaacccgaaccgggcagcgtgctggtggcgccgcgtttgttggcgcagctgaacgtgaaagtgggggattcgctggaggtgggcgacaccacgctgcgcatcgccggcgaaatcattcaggagccggacgccggcttcaatccattccagaccgcgccgcgcatcatgatcaacctggcagacgtcgataagaccggcgcggtgcagccgggtagtcgcctgacctaccgttatatgttcgccggcgccgagccggatattcagcgttacgaggaacggctggcgccgcagttgacgccggatcagcgctggttcgggctgcaggaatccggcagcgcgctcggcaagtcgctgcagcgctcccaacagttcctgctgctgtcggcgctgctgacgctgctgttgtcgatcgccgccgtggcggtggcgatgagccactattgccgcagccgttacgatctgatcgcggtgctgaaaacccttggcgccgggcgtggcgcgctgcgtaaattgatcgtcggccagtggctggcggtgatggcgctggcggcggcgtgcggcggagcgatcgggctggcgtttgaagcgttgctgatccgcctgctgaagccggtattaccggctgcgttgcctgccgccggcgcctggccgtggctgtgggcgctcggcgcgctggtgctgatttcgctgctggtcgggctgcggccgtatcgccagctgctggctacccagccgctgcgggtgctgcgccgcgacgtgacggccaacgtctggccgctgcgctacttcttgccggtgacggcggcgatcgtggtggcgctgttggtggcgctgatgggggccagcacgctgctgtgggcgatcctggctggcatggcggtgctggcgctgctgctgggcggcatcggttggggcagcctgctgttgctgcgccgcatcacgctcaagagcctggcgctgcggctggcggtcaaccgcctgctgcaccagccgtgggtgaccatcagccagctggcggcgttctcgctgtcgttcatgctgttggcgctgttgctggtgctgcgcggcgatctgctcgaacgctggcaacaacagctgccgccggacagcccgaactatttcctgctcaatatgaccgaggcgcaggtgccgcaggtgaaaaccttcctgcagcagcaccagatcaagccggaaacctattacccgatcgtccgggtgcgcctgaccgagataaaccagcaggtggcgaccgagcgggtgcatgaagacgatccgggcggcgaggcggtgaaccgtgagctgaacctgacctggctggctgaactgccggatcacaatccgctggtggcgggcaattggccgccgaaaaccggtgaggtttcaatggatgaaggcatcgccgggcggctgaagatcaagctgggcgacacgctgaccttcagcggcgatacccaggcgttcagcgccaaagtcaccagcctgcgccaggtggattgggaaagcctgaagccgaacttttactttatcttcccgccgggcgcattggacggccagccgcagacctggctcaccagcttccgctacgacggcgacggccagatgctgacccagctcaaccgtcagttcccgacgctcagtctgctggacatcggcgcgatcctgaaacaggtgggcggcgtgctgcagcaggtcagccgcgcgctggaggtgatggtggtgctggtggtgctgtgtggcggcctattgctgctggcgcaggtgcaggtcggcatgcgtcagcgccgtcaggagctggtggtgtaccgtacgctgggggccggcaaacggctgctgcgccgcacgctgtggtgcgagttcgccctgctggggctggtggcgggcatcgcggctgcggtgggcgccgaggcggcgctgtggctactgcagagccgggtgtttgacttcccgtggacgccgacgccggtgctgtggtgggcgctgccgctggccagcgcgctgctgctgtcgctgtgcggcggctggctgggcgtgcgcctgctgcgcggcaaggcgctgttccgcagttatgaggggtgatgcggctatttataacgccggatgtgataagcacccggcttggcagaaaagagaggcgtcgtctttaaactgtattattttcgtgttttataatgtgtgatctgcgggttaccaccaggaacgaagggaatgaaaatctactggtcacttaaaagtatcccggaattaaaaaatttgcctttgcgcgaacgtctcggacgttggcagcgtggccttgcttcagcgggattctttaacggaacgggcatattgctggttgcattgttgccgtggttttcgattcttatcgctaacgatctgacccttaattaccctttcttgcgcaatcatatcgtcacagcgcttggatatggcatcagtggttttttgggtatgaatctgatgataagaagtatgctaaggaaaaataagaatattttttctgattaagcgcagcggtttaaaattgtcgtcataaaaaaggggttagccttgggctaaccccttttactttcggcggcgtgcgctttaggccagcttctgctgtgcccaggccagcccgctttggtattcgcccggcagcagcggtgccagcgtctgcagcgcctggcgcagatcggcggcgctcgggtcgttcagattgaggtggccgaccttgcggccagggcgcacctctttctcataccagtgcagatgcaccagcggcagcgacagccactgttcgttgacggcggtgccgatcaggttgaccatcaccgatggcgtgctcaccaccggctgcggcagcggcaggccgaggatggcgcgcaggtgcagctcgaactgactgatggacgcgccgttttgcgtccagtggccgctgttgtgcacgcgcggcgccagttcgttgatcagcagccgatcgccgacgataaagcactccatcgccatcacgccgacgtagttcagctcgttcaggatcgccgccagcatctgctcggcctgttgctgcagcgccgggttgggctgcggcagcgccacgctggtgcgcaggatgccgtcttcatgcaggttgtgggtcagcgggtagaataccgaacggccgtcgtggccgcgcgcgcccaccagcgacacttcgccggagaaattgatgccttgctcgacgatgcattcgccataggcgtcggccggcagttcggcttcctggcccggacgcaaacgccattggccacggccgtcataaccgccgacccggcgtttgacgatcgccagctcgcccagcgcagcgaatacctgcggccattcggcggcgctcgccagcagctgccacggcgcggtcgccaggccgagctggtcgagcagctgtttttgcgtcaggcgatcggccagacgcgggaagatgtcgcggttgacgaaggcgctatgggtcgccagctcgcgcgtcagcgcggtttccggccagcgttcgatctcggcggtaatgacgctgttctgatacggcaccgcctcgggttcggcatcgatgccgacagggtagacggcgatgcccagcggttcgccggcctggcgcagcatgcgccccagctgaccgttgcccagtacgcaaaccggcttcatgcgtcctcccgcggatcggggtggttcaaaacgtcttcagtctgcgcctgacgccagtccgccaaacgctgcgccagtgcggcgtcgtgcagcgccaggatctgcatcgccagcagcccggcgttggcggcgccggctttgccgatcgccagcgtccccactgggatgccgcgcggcatctgcacgatggagtagaggctgtctacgccgctcagcgcggcgctttgcaccggcacgcccagcaccggcaccagggttttcgccgccagcatgcccggcagatgcgccgcaccgccggcgccggcgatgatcacgtcaaagccgttggcggcagcctgctcggcgaagctgaacagcttgtccggcgtgcggtgagcggaaacgacttcgacatggaaggggacatcgagctgggtcaggacttcggcggcgaactgcatggtggcccagtcacttttcgatcccattacaattgcgattttagccccggcattggcggctgaagcggcgttggctcccatgggtgtaaggctcctgtgatttgtctggcgtcggctgagggccgaatgagggcgtagagcataccatgagcgcacggcgaggaaaacggttgcgtcgccggttttcaccggcgaaagcgcgaattttcactcgcgcgcctgcgcggaactcagaatgggaattggatcagctcgacagcgtcggcgctgactttgatcatcgatccttcgacgtgccaggcgcccagcaccgcgcgatgggcttcgccgttgctcagcgccagccggtgcaccgccgggcgatgggtatggccgtggatcatccagtgcacgtcgtggcgcagcatcgtttgctcgaccgcctgcgggttgacgtccatgatggcttccgacttgtactggttggattgctggctgcgagcgcgcatgttggcggcgatcttcagtcgccagcgcagcggcagcgcgaggaacaatttttgaatcagcgggttgtgcactttacggcggaattgctgataggcttgatcgtcggtgcacagggtgtcgccgtgcaggatcaggatcctgcggccgtacagttccagcactttttcttccggcagcagctgcatgccgctggcgcgggcgaagcgcttgccgagcagaaaatcgcggttgccgtggatgaaatagcagggcacgccggcctgttgcagcgctttgagcgccgcggcgatctccgcgtgcagcggctcgggatcgtcgtcgccgatccaggcttcaaacaggtcgccgaggatgtacagcgcgtcggcgtgcaccgcttcgcgccgtaaaaaacgcagaaaaccggcagtgattgccggttcctgtgcgcacaagtgcagatctgcgatgaacagcgtactcatgcagccgcgattactcgctgacggtcacgctgttgatgacgacgtcttctaccggtacgtcctggtgcatgccgctgcggccggttttcacgcctttgatcttgttgaccacgtccatgccttcaaccacttcagcgaacacgcagtagccccagccctgcacgttttcgccgcggaagttcaggaagtcgttgtcagccacgttgatgaagaactgtgcggtggcggagtgcggatcgttggtgcgcgccattgccagggtaccgatggtgtttttcagaccgttgttggcttcgttcttgatggtcgcgttagtcgctttctggttcatgcccggttcgaaaccgccgccctggatcatgaagccgttgatcacacggtggaagatggtgttgtcgtagaaaccggcgcggcagtagttcaggaagttttcaacggtaaccggcgctttgtcagcaaaggtcttgataacgatatcgccgtgattggtgtggaaagtaaccatagttttaatcctaacaaggtgaagtgagacgtcacgtaaagcgagtgaacattcagaccgcccttataacatatccgccccagcgagtcagcagcggctcaaccgcgcactgtctgtggtaattgcatttgtgttatattataacaattgtgccggccagcgaatttcgcgcattttattcgcgtgaagtcagcaaagcttggccttaaccttgcaatagatcaggcttcaggtttcaatacgctaccgggcgtaaaacctgaagcccggttatcttttttgttatcacgcacaccacggaatctcccgatgctaaagatttttaataccctgagtcgtcaaaaagaggaattcaaacccattcatgccgggaaagtgggcatgtacgtgtgcggggtaaccatctatgacctgtgtcacatcggccacggtcgtacctttgtcgctttcgacgtggtggcgcgttatctgcgctatctcggctattcgctgaactacgtgcgcaacgtcaccgacgtagacgacaaaatcattcgccgcgcggcggaaaatcatgagacctgcgaccagctgaccgaacgcatgctggcggaaatgcatgccgacttcgacgcgctgctgatcgatcgcccggatcaagagccgcgcgcaacccagcacatcgccgagatcatcgagatcacgcagcgccttatcgatcgcgatcacgcttacgtggccagcaacggcgacgtgatgttctccatcgacagcgatccgcaatacggcctgctgtcgcgtcaggatctggatcagctgcaggccggcgcgcgcgtggagatcgacgacgtgaagcgtaacccgatggacttcgtgctgtggaaaatgtccaagccgggcgagccgagctggcagtcgccgtgggggccgggtcgtccgggctggcatatcgaatgctccgccatgaactgcaaacagctgggcacccacttcgacatccacggcggcggttccgatctgatgttcccgcaccacgagaacgagatcgcgcagtcgagctgcgcccacgacggcccgtacgtcaattactggatgcactccggcatggtgatgatcgacaaagagaagatgtccaaatcgctggataacttcttcaccatccgcgacgtgctcggccattacgatgcggagacggtgcgttacttcctgatgtccgggcactatcgcagccagctgaactacagcgaagagaaccttaagcaggcgcgcaccgcgctggagcgcctctataccgcgctgcgcggcaccgacgccgatgccgcgccggccggcggtgaagcgttcgaagcccgcttccgcgaagcgatggacgacgacttcaacactccggaagcctactcggcgctgttcgatctggcgcgcgaagttaaccgcctgaagagcgaagacatggcggcggccaacggcatggcggcggagctgcgcaagctggcgaaagtgctcggcctgctgcagcaagagccggagcagttcctgcaagggggcgcacaggttgacgacggcgaagtggcggagatcgaagcgctgatcaaacagcgtaacgaagcgcgtgccgccaaggactgggcgctggcggacgccgctcgcgatcgcttgaacgagatgaacatcgtgctggaagacgggccgcagggcaccacctggcgccgtaagtaagccggccgaagtgaaaacaaaaaaggcgctgaattcagcgcctttttctatggctgcaggttagggtttaaccatgaccttgccgccgttgaactccaccacctgatcggcgacgatcttgcagcgcttgcgggtttcgaccttgccgtcgactttcaccagcccttcggcgatgacttctttggcggcgccgccgctttcacaccagccctggaacttcagcagatcgcacagttcgacgtggggatgattgtccagattgaaaatttccatactgccttacttatttaggttgaacgtcgtgatattcctcgcaggcctgcaaggtattttggatcagtgtagccacggtcatcgggccaacgccacccggcaccggggtgatgtaggcggcgcgctcgctggcggcgtcaaaatcgacatcgcccaccactttaccgctttccagacggttgatgccgacgtccaccacgatggcgcccggtttgatccagtcgcccgggatgaagcccggtttgccgaccgccaccaccagcagatcggcgttctcgacgtgatgacgcagatttttggtgaagcggtgggtgaccgtggtggtgcagccggccagcagcagctccatgctcatcgggcggccgacgatgttggaggcgccgaccaccacggcgttcaggccgtaggtatcgatgttataacgctccagcagggtgacgatgccgcgcggcgtgcacgggcgcagcttgggcgcgcgctggcacaggcggccgacgttgtaggggtggaagccgtcgacgtctttatccggatggatgcgctccagcaccttgacgttatcgatgccggccggcaacggcagctgcaccagaatgccgtcgatttcctcatcggcgttcaactggtcgatcaacgccagcagctcggcttcactggtggcagcgggcaggtcgtaggagcgggagaggaagccgacttcatcgcaggcgcggcgcttgctggcgacgtaaatttgcgaggccgggttctcgccgaccagcacaaccgccaggcctggggcgcgtttgccggccgccagacgttgtttcacttgctcagccacttcgtttctaacctgctgcgcaatcgttttaccatcaataatctttgctgacatcagtgtggaaatccatcaattaagaaaagcggggatgccgctattctgtcagaagctgagcgcgctgtcaggcgcagaatcaccctcgccgccgttgccgaggccgatttacgctttttttatgccggcttcaggaacctctacgccatttttaccggcatttgcatacgctggggccatacacagggcgaaagagggcaggatcatgagagcgataactcggctttatccgttgcatcaccagcctggcgagcaaccggcgcagcctaaacatgtgggggagacggtgttcgattcttcgctgcatccggcggacagtgagcaactcaccgcgctgcatcagctcggcaagcatgaggcggcgccgttgtggcgggcacgcctgaatgcgctgtggcggaagttatgcgtatgaagggctgcgcctgggcaggctgcacgctgttgctggtttgggcatcggggagccaggcttctttaaacagcgcacgcgctgacgccgcatgggttgaaaacgtggcggcgacttgcaacacacgggtgattgagcatgccgattggggggacattgccgcagtggttatgtctgctcgcctctgccagcggcgggacaacgggcggcaagggcgtgagcacgcgccgatttacgtaggcgccgggctggctcagcgtaacggcgcccgttgacgagaaccctcgccgcgcgggcgctggtggaaaaaacgccataaagcacggccgccgtcgtaacgtcatgaaaaggcattgactcgctaacctctgaccgtataatcgcaacccgcagccgcaggttgccgcatctcaatgcgcccttagctcagttggatagagcaacggccttctaagccgtaggtcataggttcgaatcctatagggcgtgccattaagtatcaattagttatgctcattcccccactgcaagattttccaaaagtgccaggttagtgacattgcccgccaagacttcgtcaatttttctcgcatgttcggttagatgagttggggataggtgagcatatctctgtaccatctcgatgctctcccatcctcccatttcttgcagtgccgaaagtggcacgcctgcctgaaccaaccagctcgcccacgtatgccgccgtttttgcttcatgtgagcgcgatatgagaaaggcataaaaatggccacgccaaaggataggctatttgatagaacggcaattaatacgcgaaaaggattaaaggcgctgaagtgaattaaagaattttcccttccatcacgtaaaaatctccattcatcgttgtgtagtaagcataagaaatgtgtttttcgaagttatcgcagtgaacaacggtatttttatcggattcttgccaggaaatcatgaaatagccgtcagccaatgaacgccactggaaaggcacattcataatggttccgcgaagttctccgtttagaaactcaacggtaatggtgttttcactggcatggtaggcgtttttaacttcgagaccattgtccatcttgatggtaaaagattggcctgcataaggaaattttacagccattgtcgcaactcctttaatgtgtcgtagctgaaaagcggcggtgaagcacgctgctatcccgaatcactcatgcctaaggcggtagtgaggtcagccagctgagcgttaagcggctggataggtccaatagtagagagggcgcatcggtggaaaaagggagcggcgggcaattcacttttctctttttgttcataaaggggatgggcggcaggttactgttcattgcgggggggattaagtgacgggactttgtctgacaccgagcgcggtcacaggaaacggcaagcggcattgaaccttcgtttattttgccgcgttacaataggtgaaaatttacccatggagcctatcgtgcgcaaatccagattctttctcgtgaccttgctgtgtctgtgcgccgccgccgtgctgtacgtcatggcataccgggcgctggggcattacctcagcgacggcgagaaggcctacccggatatcagcgttgaaattcgctgagggccggtcggcgcggtggtgatcgcgccgacttttttgcactgatttacccgccatttacccgccgtcggcaatgatgacgcagcgtctccacattgtgtggttctcttgggcggaatgcggttatgtcactgcaacaggtttcgaatgtctcgttgagcaacaacggcttaaagggcatcggttacaaacattatgcgttggcgatcgtggcgttttcggcgctcgtacggtctatatccttaaccgacaggtatttttggtgcgatgaggcctccagcgtgctgaccagccgctatgacgtaggcgctttgctgtaccacgcttccttcgatgttcacccgccgctgtattacctgttgctgcatggctggatggtgctgtttggcgacagcatcatggccgcccgttcgctgagcctggtgctcggcgtggcgacagtggcgctggcgatgcgctttacccgttggctggccaacgagcgggcggcgctgatagcgggctggctgatggcgatcatgccgatggcggtgcgttacagccaggaggcgcgcatgtatgcgctgatggggctgctggcgatcgccgccgccatggcgttggcgaagtggctgaaaacgccggataaccgccgttatctggcgctgtatgcgctgttgatgacgctgagcttttatacccattacttcacgatttttaccctgatcgcgcattggctggtggtgttggcgctgtcgtgccgccgcgaaggcgagtgttatatcaagcaaccggcgtggtggctggccaatgcggcgatcggggtggcctacattccctggctgctggtgttgttcaatctgctcgcgcatatcgccgagctgcgggtcggcggcgacgtcggttggatccctcaggtttcctggagcgatctgccggcgatgttctggcgttttctcaccggccatgatggcagcaactatcccacgatcattctctggctgttgccggcgatgtttgtcgctttatgttcactgctgctgtggcggcgccagatgcagagaaaatacgctctgctgctgctcggcggcattctgatcccggtaatgttggtattcgccatttcctggcgctcgccgctgtttgtcgatcgctatctctattccgccgcgctcggcattccgctggtgttgggcgtgctgatcgccggaacgaaaaaccgagtgcgcgggatctctttgctgctgttcttcagtttgttgttcggctgcggcgtgcgtaacgattacccggccgagaaagatgagttcaaggtgatggtgcactatatcaacagccactatcagcctaacgatgcggtagtggtcagcaacatgttcaactacctgagctatgtgtattacaacaaacagggctaccgcgccttgctgtataccccggccaggcccaacggcatctcgggtaagcccaatgcctatggtttcggcacctttttccacgatcgggcggcgcagacctacgtcgataagctcagcgccttatcgaagggccatcgccggatttggctggtcagcggcggcgatttcaaccaggacttcggccgttcgccgccggggtgggtcaacaccgttaccttcaagagcggcgggttcgagtcgcgcctgttcgcggtgcgttgagcaaaatgtcatatttcccattcggcgttacatctggccgagcaaacttacgcggggatgacagttctatacattgagattgatactgtagctctacccgatgatgttgtgtgttatccattccctgtagtgtattaccccatccctgttaagtttatcccgccttgtgcgggattttttttatctgcgcggggcgagatgcaggccgccggtcatgatgttgcgggtggccggcagggcgagaaaatcgtgtgggaatcccagctcgatggcactgagatcgtccaatcgccgccaatgatcttccgtcagcgccaccttcaatgcaccgaggttatcttccaattgcgccagagttcgggcgccgacgatcggcgcggtgaccgtcggctggcgcaacgtccaggccagcgcgatttgtgatggggcatacccggtctcgtgagcgatcaggttgacggcatcggcgataccgagattgcgtgcgttcaatgtccccttggcgcgtacggcttcgcgccgagtgcccgcttcatctggcgatggctgcagatcctgtcgccggtatttgccgctcagcacgccgccggccagcggcgaccaagggataacgcccatccccaattcttgcgccatcggcagcagttcgcgctcgacggtgcgttccagcaggctgtactcgatttgcaaggcgataagcggcgaccagccgcgcaggtccgccagcgtttgcatcctggacgcctgccaggcagggagatcagacaccgccacatacagcacttttccggcgcgcaccaggtcgtccagggcgcgcatgatctcttccaccgacgtggtgaaatcccaggcgtgcagatagagcagatcgatgtaatcggtattgagccgttgcaggcttgcttcaaccgatcgcagcatgcttttgcgatggttgccgccggaattgggatcgtctggctgcatcggcagggtgtatttggtggcgatcaccaaccgatcgcggcgcccggcggcgaactcacccacgaaaagttcggcgctgccctcggtatagcggttggcggtatcgataaagttgccgccgcgttcgacataaacgtcaaacagacgtcgagcctcggccagttcggcgccccagccccagtcggtgccgaaggtcatggtgccgagcgccaacggtgaaacgcgcagaccggaacggcccagcaggcgatagtgatccagtgaaagtgtggtgttcataggcattctcccgtgtagatgccgtccacgatagcgcccgtaggttgtttaaggaatgggctataatcttcatgaattattaagtagggagagcataatgaggggcagtgatttcgccgaattgcgcgcctttgccgctattgtcgagcacggcggcttcgcccgcgcagccgcacatttgggtatatccgcttcggcgctcagtcaaacgctgcgcaacctggaggcgcgtctgggtgtgcgtttactgaatcgcaccactcgcagcgtggcgccgactgaagccggaagactgatgttggcgcgcctgacgcccgcgatggccgagatcgacgcggcggtggcgcaggcggtagagcaacgccagaacccctcgggtcttttgcggcttaacgtaacccgcgtggcggcgttgcattttctggcacccttgatcgcgccgtttcatcatcaataccccgatattacgctcgatctcaatgttgaggagcggctggtggatatcgttgccggcggttttgatgccggcgtgcggctgcacgagaaactggcgaaagatatggtggcggtcaagctgggcggggaggtgcggatgcgtgtcgttgcttcgccggcgtatttggcgcgtcacggccggccgttaacaccgggcgatctgcatcggcatcggtgtttgaattaccgctggccgaccaacggcaatgtgtatcgctgggagtttgagtgtgacggtgaaaagcaggagatcgccgtgaaagggccggtgacagtcgatgagccggaaatattggtgagggctgcgatggatggggtaggcattgcctacctgtttgagcaacaggttgccaccggcctggccgaggggaggctgttaccgctgctcgatgcctggacccctccgttccccggtttctatctgtactatccggcaaaccgccaaacgccgcgcccgctacgcgcttttatcgacttcgcccgtcaacaggcagaacagggcgcgtaacgcgatttttttgaataacaccgtcagttttattcggtattcagtcgctgtgcgcttgattagattgaacgcgagaggggcgccgtcggcgcctttgtgcaatgagtggagaatttctatggcgaagacagtagtggtgtttcattccggctacggccataccgagcgtttggcgaaagtggtggcggaaggcgccggggcggaactgatcgccatcgatcagaacggcgatatcagcgacgaagcctggcagacgctggatgaggcggatgccatcatctttggttcgccgacctatatgggcggcccatcctggcagttcaagaaattcgccgacgccagctccaaagcctggttcggccgcaagtggcaggataaagtgttcggcggttttaccaacagcgccagcctgaacggcgacaagcaggtgacgctgatcgcgctgcagacgctggcttcgcaacatggcggcctgtgggtcagcctggggctgctgccggccaacaccaaatcggcgcagcgcaccgacgtcaataacctgggcggttcggtgggtctgctggtgcagaccccggcggatgccggcgtggatgagatgttgtcgggcgatctggcgaccgccaagctctatggtcagcgcgtagcgggctttgccgccaaactggcgtaagacctatcgtgtagatgggacggcggtgcggttgaacggatgccgcgttcattttctctgcacaattggcgtgtaatctgcgaaatgttattagcctgcttgggctaacactgcatttcgtacaaatattcccggttcctaggccgggttttttgttgctaaggtctgcttaagctttcaccgctatactgcgcgtcagcacggtcatgcaatgcatggccgtgtcgtaactgtcgatttgctgttgttcaagcaagcccgcttcatgcgggctttttttgggttgttattgcacaggcggcccagttgcaggaaaataatcgcacagtgattcaaacatcatttaatgaccaataaccacaagtttattaatgtaattaacgctctcggcggcctattacgctatgcgctatgctgacagcagagcgggcattatttgctgacgctatgcggggagttacggcgcggccgcatcaggctaagaaaattctgttaattaaatgttaatgttttttattattgatttgtctggcttttttggttgaaattcggattgactatccctcactggccgggcgagagagtatgcatattattattctggttattagcaaaatatgggcgaggcgatgagcgccagaataaacgccaggcatggcctgccgctaacggtgcagctgatcaatcttttcatgctggcctttttactctccctggtgggtattcttagccggccgataggttcactttctttattttggccggtcaacgcgattctgctcgggctgctgctgcgtaaacccgtttacgctacgccgctcggctggctcaccacttatctgggcatggtcgccgccgatctcagtaccggcgagggctggtccctggcgctgtggctgaacgcctgcaacatgtcgctgatcgccgtcggttacggcatcatgctgatgctgccgcaatctcaacggcgcatgggcaaaccccaggcgatactctatatgttcagcgccagtctggccggatcggcggtggcgtcgacgctgtcggtgctgcgtaacgacagcctgtacaacaatacggtggtggtcgcctggttggcctggttcagtgagcagttctcgacgaccttgttgttgttgccggtgctgatggcggcgccgcggttgaaacagctgtttcgcatgcaggtgcgttggcgcctgaaaggctgcctgccgctattggcgctactgctgtcgctggcgttcagcgtctatatcggcgggccgggcgccatcgccttcccgatcccggcgctgctgtggtgcgcggtgcgctaccagttgttccccgtgacgctgttgacgttgttgaccggcatgaccgagatcagcaacatttcagccaacctggtgctgtatgaaacgccgaacaatcacaacgccttcctcgacaccctgatgtctgcccgcttgggcatcgccatgctggtgatggggccgctgatcctcgccagctctatcgccgccaatcgcaagctgatgcggcgtctggagcacagcgccaaccacgatttcctgaccggggtgctggcgcgcagcgcgatgacgcgcaaagcgggcgagctgctggagcacaagcaccgctcgaaagaggcggtgtcgctactgcttatcgacatcgatcatttcaagcagatcaacgatacgcacggccacagcgccggcgatcaggtgttggcgtcgttcgcgcacatcgtgcggcgcgagctgcggcacgatcagctgttcggccgcctgggcggggaagagttcgccatcatgctgccgcgcgcgctggcggcgcagggcgtggcactgggggagcatctgcgccggttggtggagcaggcggaactgcaggcggaaggcaaacagacgctgaaaatcaccatcagcgtcggcgtcgccagcctggcgatgaacgaagtgaaatcgctggagcaactgatgaatatggcggatatcgcgctgtatcgcgccaaatcgcaggggcgtaatcgggtggagtcgttcaacgtggtgaacggcaacagcgtcgagcatattctgtttcgctaaccgctttcagccttgcctgggctcgaagcgggtctcgcaattagggcaaatcagtatcacgtcttgcagcattgccgcgcatttttgccgggtaacatagccgcatttagggcagacgatttgggtggagcggttgataaaacctttgacgctgctggaatcggacatatcaatagcctgtgtcaggtgaaaactcacgctaacacaggcgacgacaaattccgttggttattttctgtacgcagaggctacaagcttttcagcgccttgatggtctcatccatgtcgatctcgtgctcggagaaggtatgggtggtgttctggaaggtggtgatggtcagcatgcgcagcgtttgcatggcctgcgcctggtcttcggactgcgggcgaatgcggttcatcagcaggccgaccgacagcacggtgttctctttatccacatcggctttgaccggcacttccttggtgaaggtattgaaagacttgatgctggcgatcttgattctttcattggcgatgatgatgtatttgctgggcgccaacactttgaccgcataagccgacgggcctttggtgttgttggtcggttcgaaggtcaccgccgcgtttttcttaatcagctccggattttgcactttaatcacgtgaaaataacgattttctccgttctcgtcggtaataaagccgaagcctttgtcttcaaaaaaagtcgttatcttgccgttcatcgttattctcacaaaagggatcaatacagcgcttatgatagcgcggaatgccttgcagcgacagattgcgcgggcggcatttagtcatgcgataacggcatttagcggcttttcctccacatgctatgttcatgctgacttcattcaatgcgaaaaaggaatatcgatgggtatcaaacgtctcaatcacgccgtgctgtatgtcagcgacgtgcggcagagcgccgacttttatcatcaggtattgggcttcaagctgaagccgtccgacagccccgaccgggcggtatttacccaggccgccgattcggacaacgatcacgatttggcgttgttcagcaagaacctgggccagcagcgcgccggggtgtttcgcgccaacggcgagccgccggcggagcatgagccgccggccgggctgtaccatctggcctgggaagtggacagcctggaagagctggagcgcattcgccaccagctggccgaacgcggcattctcgggttggaagaggatcacggcgtgcacaaaagcatttatggccacgatccggacgggctgctgtttgaggtgacctggtttattcccccggcgttgctgaccgaagaggacaaaaaccagcaggggatccgcccgctggatttcgccgccgagaagcggcgtttcgccggcctctaacctgctgctgcccggggcgcatcggcgccccgacgctcacagcactttgttgagaaagttaacggtgcgggggtgctgcggctgagccagcacctgcctggcgtcgccctgttcgacgatctgcccgtcgaccataaacaccacccgatccgccgcttcgcgcgcaaagccgatttcatgcgtcaccaccaccagcgtgacgcccagatccgccaaccctttaatcacgtccagcacttcgccgaccagctcgggatcgagcgcggaggtcggctcatcgaacaggatcaccttcgggttcagcgccagcgcgcgcgcgatggcgatgcgctgctgttggccgccggagaggtggcgcggataggcatccgccttgtggcgcagcccgacggtatccagcagctcataggccaccgctttcgcccgttcgcgggagtgaattttgtgcaccaccggcgcttcgatgatgttttccagcaccgtcaggtgcgggaacaggttgaagttttggaacacgtagccgacgttgatgcgctgccggagaatggccttttccttcagctcgtacagccggttgcccttgcggcggtaaccgacgtagtcgccgtcgatgcggataaagccttcgtccacgcgctccaggtggttgatcgcccgcagcagcgtcgatttgccggagccggaaggcccgaggatcacggtcacggtgcccggctgcagcgtcaggctgacgtcgtccagcgccttgtgtttgccgaagaacttgctgacgttgctgatttcgatcaggccgcgcgccggcaccggggtgaggttgcgtgccggctgttcgggcaaggcgtaataatcaatggcttcagacatgcgggtctcctaacgttttagccagccggccagtttctgccagggcgtcggcggcagttcgcgcaccgcgccccgggcgaaatagcgttcgatgtagtattggatcaccgacagggcggtggtgatgaacagataccagacggtggccaccatcagcagcggtatcacctgctgggtgcggttatagatcacctggatggtgtaaaacagctccggcagcgccagcacatacacgatcgaggtgcctttcgccaggctgatgatctcgttgaaaccggtcggaataatggatcgcagcgcctgcggcagaatgatgcggaaggtgcggcgatagcccggcaggcccagcgccgccgccgcctcgtgctggccgtaatccacgcccagaatgccgccgcggatgatctcggcggtataggcggactgcaccagcgtcaggcccagcaccgccacggcgaactggccgaggatatcgatggtcgggtagctggcgaacaccaccgaggtaaagggaatgcccagcgagatggcgtcgtacagataggaaaagttatacaggatgatcagcaccaggatcagcggcagcgagcgaaacagccagatatacccccaggccagcgacgccagcaggtaagagcgcgacagccgcgccagcgccagcagggtgccgaacaggatgctgaacaacgtgccgagcagcgtcagcagcagggtctgccccagccccgccagcaccgccggggcgaagaaccattcggcgaacacgccccattcccagcgcgcgttgcccgccaccgattgcacgatggcggccagaataaacagcgagaacagggcgccgatcagccgcagcggatagcgggcgggcaccactttcaagacttcttgtttggacatgtcatgtctcctgactacagataaaggggggttaggcgattttcctttccgacgcgcaacaacacgcgtcctctgcaatcaggcttttgcggaacggcaggcggccatcgtagggcgggcggctgtaaacctcgctgtcaacggtgggatcgaactgcggctgataaccgttgctcaggtacaggcccaccgcttcgggctggcgaaagccggtggtcaggtagagccggcgatacccctgcgccagcgccagcgtttccaactgctgcaacacccgctgcgccaggccctggcggcgcagatcgccccgggtccagatgcgcttcagctcggcggtttgcgcgtcatagcgtttgaaggcgcccatggcgatcggcgcaccggcgcgcagcagtacgatgaaggccccttgcggcggtgcatacaggtccagcggttccggttcctggtcaccaaaatagtcgccgtaacgctggcgatattcaccgaacagcccctcgatcaccggggcgatcagcgggtcggtcggcaacgtctgaatgaaggtgtcttgcgtcattgcgcgctcctaatcgcccaggccgggcgggttgatttccgactgcgcaaggcgttcgacgctctcgccccagcgattgagcacctgatcgtactgtccgccgcggatcgcgccgttcagcgcttcattcaccgcctgcaccagcccgttgcctttacgggtggtgacggcgatgtgtgccgccttgggccaaccgccttccaccgtgcccgccagccgggtgcggccgttcagcgccgctttataggcgcccagcacgttcggcccgaaataggcgtcggcccggccggactggatcgccagcgtggcggccgcatcgtcggtcacgtagatcggctggaagggtttgagcccctgctgccggttctgtttgtcccacgccagcaagatggcttcctgattggtgccggagccgacgatgatctttaatccggcgatatcggcaggctgtttgatcgttgcgatcttgccgccggttttgacgtaaaagccgagcgagtcgatgcggtaggtggcgaagtcgaagcgggttttgcgctctttggtcacggtgacgttggtgatggccgcgtcatacttgccggaaaccacccccagcggccagtcttcccacgacgtttgcactacgttcagctccaggcccaggctgtcggccaccagctgcgcgatatccacttcgctgccgataagccgccggttgtcggcagcgaacagcgccagcggcggcgtgttgagcgcggcgattgcaacggtgaattggcccggcttcacgaagtggaaatcggccggcagtttggcgatcgcctgcgggtttttcggcgcgtggatcggggtttcattggcctgtaaatcgatgccggtgcccgcctgcgcggcgccggtcaggctcagcaaggccgccacgagagcggcggtaacggttttctgcatagcgggtatccctgaaaacgatcttattattgggtgaatctgttcaacgggtgcttcaggcccaggtgttcgcgcagcgtatcgccgtggtacgcccggcggaacaggccacgttgttgcaggatgggcaccacccgatcgacgaagtgcccgaaggcgttgggcgtaccgccgctgatgatgaagccgtcggcggcttcgccgtcgaaccagcgttgcaggccgtccgccaccgcttccggcgtgccgctgaacaccgggcgcggcgaggcggcttccagcgccacctggcgcagcgtgaggttccgctcgcgggcgttgcgcttgatggcgtcggtggtgctgcggaagctgttttgccccagatcgccgatgtccgggaagggggcgtccaacggatggcgggaaaagtcgtaatgttcgaagtagcggccaaggtagttgagggcgttctcgatgctgaccagacgggcggtctcctggtactgacgctcgacgtccgcatcgtcgtcgccgacgatcacgctgacgccctggaagatgcgcaggtcgtccggttcgcgcccctgttccaccaactgccgcttcacgtcctggtagaaatcctgcgcctgctccagcgtgtcgtgatgggtgaagatcgcatcggcgtgtttggccgccagccgtttgccgtcttcagaggcgccggcctggaacaggatcgggcggccctgcggcgtgcggccgatgttcaacggcccctgcaccgagaagaactccccctggtgattgagggtgtgcagtttcccggcgcggaaaaattcgccgctggccttattgcgcacgaaggcatcgtcttcccaggagtcccacagtcctttggcgacgtcgagaaactcgccggcaatgcggtaacgcaggctgtgctccgggtgttctttgcgcgagaagtttttggccgacccctccagcggcgatgtcaccacgttccagcccgcgcgcccgccgctcaggtgatcgaggctggcgaactggcgggcgacggtgaacggatcgctgtaggaggtggagagcgtgcccaccaggccaattttgtcggtggcggcggacagtgcggccaataaagtcaacggctcgaaacggttaagaaaatgcggaatggacttttcgttgatatataagccatcggcgacgaagacgaaatcgaatttcccttgttcggcttttttcgccgaggcgatattaaattcgaggttaatgctggcgtcggcggtggcatccgggtggcgccaggcggacatatttcccgatgcgccatgcagaatggcgcccagccgtaattgccgttgattattcgcgttgtcgctcatcgtgattatcctgtcatgcgccgcaaaggcgcgcggtgtctgatgcgtccactattgatgagcggcaacgggatgtaaaacaacaaaacagcatattcaaatgttgaaaactgcaaatatcacggcgagcgaaaataataatccccgacgcggcatcagcggcgtcggggaaatactacttcacgttattcaggcgttgctgagggcttttttcgctgcggtggttaattgttgcagcgtgcgctccgccagcagcgaaaaatagtgggcggcagggaagagggcgcgctcatcgggattgaaacgcggatggtgcaggccgaattcgctggcggagccgatgctgacgaacgcgcccggcacgtgatgcagatacagcgcgaaatcttcgccgcccatctgcagctccgcctcttcgacccggtagccggcctcggcggcgacggttttgctgaatgccgcccaatgggcgtcgttgatcaccgccggcggccccggctgccagtggagttcggcctgcgcgccgagcgcggcggcgacgccgtcgatcacctggcgaattttatccggcacctggcggcgcaccgcgtcgctgtgggtgcgcaccgtgccttccagctccacggtttgcggcagcacgttccaggtattgccgccttcgatgcgcgtcacgctcaccaccagcgattccagcgagctgaagctgcggctgggcagtgtctgcagcgcgccgacgatctggctggcggtgacgatggtatcgacgccctgttccggtttggcggcgtgggcgcctttgccggtgatgcggatctggaagcgatcgacgttggcgtaaaacggcccggcgcgggtggcgaaggtgccggtgggcagctccggcgcgttatgcagaccaaataccgccgcgacgttatccagcgcgccggcgtcgatcaggtgccgggcgccgttgaaggtctcttccgccggctggaagaagatgcgcaccgtgccgggcagctcggcctcacgcgctttgagcaggtgcgcggcgccgagcatcaccgaggtgtggaagtcgtggccgcaggcgtgcatcacgccgctgttttgcgagctgaaaggcacgtcggcgatttcgtcgattggcagggcgtcgatgtcgccgcgcagggcgatgatcggccccttgccgctgccgatctccgccacgacgccggttttcagcgccaacggcagaatacgaatgcccgcctcttgcagccagcgggtcaggcgggcggtggtggcgaattcgtgattggaaagctccgggttttggtgcagttcacgccgataggcgatgatcttgtctgccaactggctggtcataggcttggctcacagtgggaaataaaccctaaccctagtgcaggggccgccgaagcaaaaagaccatctggttatatttcatagcgattgtgtctgctcgacgcgtcaacgatgggggaaagggcaggtttaggcgttcacgcgttgttcgccggcgcagggagaggattggcctggaacggtaacgtatcgcaaccggtgcaatgcatttacaccgggcaacacggattttttcactctttatcggatttctgtgatcgcggtggtggacaaaatcctgcctgcttgctgtactgtaatcgacacaggttttgtgtctttcattcacgttaaaggtaagtttgatgtctaagattaaaggtagcgttaagtggtttaatgaatccaagggcttcggtttcattactccggaagatggtagcaaggacgttttcgttcacttctctgccatcgttagcaacggtttcaaaacgcttgctgaaggccagcgtgtagaatttgaaatcacgaacggtgccaaaggcccatctgccgctaacgttactgctatctaagctgcgtagctgaatttcttaaaacccgctcattgagcgggttttttattgggcgcattatgcgtcgctgcggcgggccaacaggctgaacagcaggatggcgacggcgtaacagccgacgatggtcagcgccatcgacaggcctgaggtgccgcccagcccggtgagcggcacggcgcaggcgccgagcgcgaacatgcacacgccgatcaaggccgacgcgctgccggctttgtccccctggctttgcatcgccagcgacgaggcggtcgggccgacgatgccgatcaccgccaccgagaagaacagcggcaccagcaacacgaccagcggcgcatgcagcgcggcggccaacagcagcaacagcgacgcgacggccgccagcgttaacccgcccctcaacacccggcgttccccccaacgtgaactgagacggctggccagctgcgccgcaatgatcagcccgacgccgttaatggcgaagcacaggctgaacatctgcgggctgaggccgtagatctgctgcaagacgaaaggcgaagcgccgatataggcgaacatgccggccattacgaagccctgcgtcaggcacaggcccatgaaatagcgctgggtcagcaacccgccgagcgacatcagcatcgccagaatgccgccctggctgcggcgctcgaccggcaaggattcgcgcagcttcagcgccgacaggctgaacagcagcacggcgatggccgccagcacgccgaagatgccgcgccagttcatcacctgcagcatcacgccgcccagcaccggcgcgacgatcggcgccaggccgttaaccagcatcagcaaggcgaagaaacgggtcagctcatggccggcgtacagatcgcgagcaatggcgcgagaaatcaccgcgccgccggcgccggcgatgccctggagcaggcgggcgatcagcagttggtcaatggtgggcgccagtgcgcaccacagcgaagcgcccagcagcaggatcagcgacagcagcagtgggcgcatacggcccagtttgtcgctgtaagggccgaaaatcagctggccgacgcccaggccgagcagcccggcggtcaggctgagctgagcggcggcggtggaggtattcagctcgcccgccatttccggcagggcgggcagatagagatcggtgcacagcggccccagcgcggccaacaggccaagcacgacggcgtacaccagacgttgtctggctaagtgtttggtcatgggagattaagatttcctgaacaggtgagaaatggcctgctgatacagatcgcgcagcagggacgcatcggctttttgcgtggtaaggatacggtaaccggtgccttcgctcatgacggcgataaactccacccgggcggcgatctcttccgtgctgaaatcgggatacagccgctgcaggttgtggcacacgtggcgaaacagccgcgcttccgcatcgctgagcaatttggccaccaccgggttgcgcgtggcctcggcggtcacttccagcatcagcatgtgatcggtttcgctctcgcccggttgctgaaacagcgtgcgcgtcgccagcgtaccggcgatcaggttgatgtgatcgccaaggttttccaggcgctgcatcttgctggtgatgatgcggttgacgatctcttcgatgatcgcgtctttattggcgaaatagcgatagatttgcccgacgctaagctgcgagccttgggcgatctccgccatgctggcggcatggaagccgtggcggcggaagctggttttcgccgcttcgacgatctgatcgcggcgcgcctgcaccttggcctgtttactgtcgttgggggggagcatctgcccgatcctttgctacgcgtgagccgggttcacatttttgggtgtgaacgttcattctcaattgtagtgtaaccgaccggaaagacgcaagatgaacgcgtgctgcgataaaaggcgtttaagcgaacaggtaggatttgataaaggtggcgacgatcagcacgcacagcgcaacggcgatcgcttcggcggcggttttcggcaggctaaacatagcgatttctcatccagtcaggggtactggatgagattatgcgcatgcaagattaaggaaacattaagggcttagcgcccgttgacccacatcaccagcatgaaggccagcagcgtcatcgccagcgagccggccaggttgagcagcatgttggccagcgcccagccgaagcggccgtcctgcatcaggtataccacctccagcgaaaaggtggagaaggtggtcaggccgccgcagaatccggtggtgatcagtaatttccaggtgggatccagatgcgtcatgcgggtgaaaatcgccatcgccaggccgatgataaaaccaccgatcagattgaccatcagcgtaccgagcggaatgtgggcgttcagcggattcattttcatacttaccgcccagcgcaaaacgctgccgacgccgccgccgataaatacggccagtaaagagctcaacatggggcaactacctttcaatcagagaaattcacgaggctcggaaagggacaggcgtaacgctacgcgcctctctccgagaggttacgtagacatcatcagcctgtgaaggcggttagggaggaatgtcatctccagcgtgccgcacggcctttttcgccgcacccggtggatgttacacctaatgccgcctattttgtagtatcggcactctgcgaggtaaaacggatggaaatcagaacggcgcgtctgagcgaccggcacgctatcgctgaattaatggcggcgctggattatcccggcaccgaggcgtttctgacgcagcggatgcagcaacttctggcgcacccggacgaggcgttgctggtggcggagcagggcgaacaagtgctgggcgtgttgtcgctgcattttctgccgcagttggcgttggccggcgacattggccgcatcagctatttttgcgtcgacgatcgggcgcgcggcgcgggcgtagggcggcggttgctggcggcaggcgaggcgctggcgcaccgtcgcggctgcgatcggctggaagtccattgccacagccgccgcgagcgggcgcatgcgttttaccggcgtgaaggctttgtcgaagcgccgaagtattttgccaagttattaagtcagtaagttactcccctggcggcgccgccgtttccagccgattgcggccattctgcttcgcccgatagagcgcgccgtcggccgctttcagccagtccagatagccgcccagcgtagggtggaagttagcgatgccggcgctgatctgcagccgcagctgcggcgcctccttgaagctgaccgcgtccagccgctgctggatacggcgcagaacgatttccgcctgttcagcgctggtgttcggcagcactgcgccaaactcgtcgccgccgtagcgcccgacgatatccacgttgcgcatgccgatcagcagctcttccgccaacgccgccagggcttcatctcccagcggatggccgaaggtgtcgttgatggttttgaagcgatcgatatccatcaggatcagcgtggcgttatcctggtagcggcggcagctgtcgaactggcgatgcagcaggtgctcccagtggcggcggttatacaggccggtcagcccatcgcgggtgctgatgcgctgcagctcctgtttcttttccgccaaccgtttggcggtgcggtaggtcaccagcccaagcagcgtcggataaaggtagatcatcggcaggcacagatagatttgcagcgctgtgctgtgcgggtgaaatgggaagccgagcagcgcggcggtcagcgccgctgcggccagttgaatggccaatcctttgacaaacagcgctttgccggctgaagcgatgttattcatgctcatcatcgacaggatgacgatggcgggcagcgcgttgaacgccatcatcgccgcccagaagccgccgaaggcggagtcgatcaacaggttgcggatctcggctttgaaaggatctttggcgcggcaggccaggcgataggcgagatgcggccagagaaagccgtgaaaggccagcaatagccagaccgccgtgggcggagccaaggggtagagtgcggcgcaaacgcagataaagccgagccccagaccggcgacgcggggcagataggtgcgtttggcgaagctgaggccggattttcgggcatcgaaaatgggtggagcaatatacatccggcatctccctgataggcatcacggcagagtagcatgcgggtgataaactaagaatagtctgggattcacgctgcgggggtgcgtggtattcctgcgaccgatctcactctgttacatgttgctgttgtgcgagccgaaggaaagtcgctaaatattcgcaggcaaggtcagtttttctcgctgttcacgcagcgctctatgataagaaggtgagtatggaaggtatcagcattaccaaacttctggtgattgcggtgttggtgattttactgttcggcaccagcaaactgcgcacgctcggcgccgatcttggcgcggcgctgaaaggctttaaaaaagccgtaggcgacgacagtacgccgccggccgccggcaacaatgccgccgaaagccagtccgcgcagcagagcgtcgagaagaaagacgtttaatctcgtctgatggcgcacaataaaaaacggatgccttgcggacatccgttttttggcgttttcgccgtctttagcgtaacaaactattacgcgttatttcacttccatccctttggcctgcagatcggcgtggtaagacgaacgcacgaacgggccacaggcggcatgggtgaagcccatcgccatcgcttcttctttcatctcgtcaaactcggctgggctgacgtagcgctgcaccggcaggtggtgacggcttggctgcaggtactggcccagcgtcagcatggtcacgccgtggcgacgcagatcgcgcatcacttcaatgatttccgcgttggtttcgcccaggccaaccatcaggccggatttggtcgggatatccgggtgcgcttctttaaagcgctccagcagcttcaacgaccacttgtagttggcgcccgggcgcacctggcggtagacgcgcggcacgttttccaggttgtggttgaacacgtccggcggcgtggcggtgaggatctccagcgcgcggtccatacggccgcggaagtccggcaccagcgtttcaattttgatgttcgggcttttggcgcggatagccgagatgcagtcggcaaagtgctgagcgccgccgtcgcgcagatcgtcgcggtcaaccgaggtgatcaccacataacgcagcgccatgtcggcgatggtttgcgccagcttttccggctcgttggcgtccggcgcgatcgggcggccatgggccacgtcgcagaacggacagcggcgggtgcagatggcgccgaggatcataaaggtggcggtaccgtggttgaaacactcggacaggttagggcacgaggcttcctcacagacggagtgcaggccgttcttgcgcatcgcggctttgatgccctgaatgcgcgttgagtcggcaggcagtttgatcttcatccactcgggtttacgcaacagctcctgccgttcggtgaccaccgttttgaccgggatcagcgccattttgtcagcatcgcggtatttgacgccgcgttccatctgaattggtttactcataatcgtgcaggttccagttacgaagctcgaccgtctggtagccgagtaaatgaacaaattcctgtaccaggattgggtgtatgtcttcaatgccaacgccgggcgccagcgcgctgacctgcgtcatctgcatgccggcgtaaccgcaagggttgatgcgttggaaggggctgagatccatcgccacattcagggccaggccgtggaatgagctgcctttgcggatccgcaaacccaacgaacagattttctgctcccccacgtacacgccgggcgcatccggacgggcgcgcgatgcgaggcggaagtgggcgagggtgttgataaccgtatcttctatcgccgtgaccaattggcgtacgccgaccttattgcgcttcagatcgaccatcacgtacatcacctgctggcccggcccgtggtaggtcacctggccgccgcgatcgctctggacaaccgggatatcgccgggcatcagcacgtgttcggctttgccggcctggccctgggtgaataccgggtgatgctgcaccagccacagctcgtccggcgtagtctcggtacgactgtcggtgaagttatgcatggcttgggatacaggcgcgtagggctgcaaccccagctgacgcaaaatgatcttgtctggttgcaaaagagtcatcgtcaggttacagaagtggtaaagccattataccgggcgctccggctggcggccagcctttcgctgaccaaaaatgcgcaacccgggaagacgctgcgccatcccgggttgataagcagggttttatgctggaattacagcaccatacgaacaatttcaatgttgcccaactcctcgtacagggtttcgacctgctcgatgtgagtggcattgatggtgatggagaccgagtggtagttgcctttgctgcttggcttaacctgcgggttgtaatcgcccggcgcatggcgctgcaccacttcaactacctggtcaaccagctcaggctgcgccaggcccatcaccttgtaggtaaacgagcaagggaattcgagcagttcgttcagtttagttttttgcatgtgcgtgcgctccagagtgctagctaatctataaattataactcccgccggggcgggagttaatgttattcagtatatgggggcaatttcgcccgtttcaaccgttaaccgaaccagtggtggaacatcagtttgatgtagtccacgatgcggctgaagaaaccaccttctttcacttcgttcatcaccaccagcggacgctggtcgatggttttgccgtccagctggaagttgatgctgcccaccacctggtttttcgccagcggcgcgtgaatttccggcgtgttcagcacatagctggccttcagatctttcatgcggccgcgcgggatggtcaggtagacgtctttatccacgcccagctcaacgcggtcggcatcgccgaaccagaccggctcggaggcgaactctttaccgactttcagcggcgccacggtttcgaagaagcggaagccccaggtcagcagtttcttgctctcggcttcgcggcctttgtaggtgcggccgcccatcacggcggagatcagacgcatctggccttcggtcgccgaagccaccaggttgtaacccgccgcgtcggtgtggccggttttgatgccgtcgacgttcaggctgttatcccacagcagaccgttgcggttcatctggcggatattgttgaaagtgaactctttttctttgtaaatcgcgtactcttccggcacgtcgcggatcagcgcctggccgatcagcgccatgtcgcgcgccgagctgtactggccctgggcatccaggccgtgtaccgtctggaagtgagtgttctgcaggcccagcttgctgacgtaggtgttcatcaggttgacgaacgcatcctggctgccggcgacgtagtcggccatcgccacgcaggcgtcgttaccggactgcaggttgatgccgcgggtcagtttggagaccggcacgcgatcgcccggcttcaggaacatcagcgaggaacctttgaacaccgggttgccggtcgcccaggcgtcctggccgacggtcaccagatcgtcctggccgattttacccgctttcagcgcctggccgatgacatagctggtcatcattttggtcaggctggccggatcgcgacgcgcatcggcgttcatctcggccagcaccttgccggagttgtaatcaatcaggatgtacgcttccgcatcgatctgcgggacacctgggatcatggttttgatgttaacgtcatcggcatgtgcaacggaggctgcgctcattgcgataacggtgccgagtgcgatgcttttgattaagcgaaaagaagttacttgtttcatgatcgggactacaacatccgtgaaagtaaagttaaaaaacgagccacactatagcagatgcgatcccggcaggcattatccattcatctgactaattgcggttagtgcccttttagctgcaagaaaatgtttcagctaaataaccgcttaacagccgtgaatgcccgccgggtttaacgctcagggtgcagcagtaacgaaagactgttgttgcgcttcgctggccaggcgttgttgcagttgggccgcctgctgacggctgctgaacgggccgagctggacgcggtaaacattgccgttggccgctactttgcccggtacgccaaactgttggctcaggctttgctgccagctctgggcgcgctcggcgctgctcaacgcaccgacctgcaccacgtagccgccggaggaggaagcggcagccatgccggcagcggcagcgccggccgcgaccggtgcggctactgcggcggcttcaggctcggcactttccagcacgccggccggtaatgcgcttggcgcgccgaggaaaccactgcggccgttggcggcgttgccggcattcgcaggcgcgtcgtcatcggtgcgcagggtgctgttatcaatagggcgcaccgccgcgccgctggcgaccggcacgtcctgttggatcggggtgcccatgccgctggagccaagatccgggcgcgccggcaatgcgtagctctgtttcgccacgatggtgccgatggtgccagggccgctcagcgtgccgtccggcgccacgttgatgaaatcgactttgaccttggtgttgttggacaggttgagacgatcggcggcggcttttgacagatcgatgatacggcccttggtgtaaggcccgcgatcgttgacgcgcaccactaactgacggccgttggccagattggtgacgcgcacgtagcttgggatcggcagcgttgggtgggccgcagtcaggccattaggatcgaactgctcgcccagcgcggtggtgttgccgttggcctcttcgccataccaggccgccaggccggtctgcgagaagttctgcggatcttttacgatgcggtaagtatcgccattaaccttataatcctgcatgttattagggttatagggttcatattgaggctcgacgccgccgatttccaccaccgggccgttgtacggctgcggaggggcttgctgttccgtggtcggggcggtacaggcggagagcaacaccgccgcgacgccgatccaaagccattccttacgcattactcacctcttataaacttttagacagcattttccgatgcgtgtggatcgacatgatgatgccgaaaccggccatcaacactatcagcgccgaacccccgtaactgaccagaggcaaaggtacgccaactaccggcaaaatgccactgaccataccgatgttaacaaagacataaacgaacaaaatcagcatcaagccgccgaccatcacgcggccgaaggtggtttgcgccttggcggcgatcatcagcccgcgaatgatcaccagcaggtagagcgccagcagcaccaacaccccgatcagccccagctcttcggccaacacggcgaagataaagtcggtatggcgctccggcaggaactccagctgcgactgggtgccgtgcagccagcccttgccggacaggccgccggagccgatggcgatcttggattgaatgatgtgataaccggcgccgagcgggtcgctttccggatcgagcagcatcatcacgcggtcgcgttgataaccgtgcatcaggaagaaccacagcaccgggataaaggccgccagcgcgacggcggcgacggcgatcagtttccagctcatgcccgacagaaacagcacgaacaggccggaggcggcgatcaggatcgacgtgccgagatccggctgcgcggccaccagcagcgtcggcaggaagatcagcaccagcgcgatggcggtgtttttcagcgaaggcgggcagacgtcgcggttcataaagcgcgccaccatcagcggcacggcgatcttggcgatttccgacggttggaagcgcactacgccgagatccaaccagcgctgcgcgcctttactgatctgcccgaaggcgtccaccaggatcagcaaaatcacgcagaagatatacagatagggcgcccagctttcgtacacgcgcggcgggatctgcgccatgacggccatcacgatcagccccatgacgatctgcccgatcttgcgctccatcatgccgatgtcctggccgctggcgctccacatcacgaaggcgctgtagaccagcagagccaggatcagcagcaggaacgtcggatcgatgtggattttggtccagatcgagcctttttgttggctttcagtcatgttctaccttagtcaccttctacgccaggcggcagcggggcctcgcttggcaattgcgtattgttgtcgcccagcagaatatggtcgaggatctggcgggtgatggtgcccaccgccggaccggagccgccgttttccagaatgatggcgaccgacaccgtcgggttattgaacggcgcaaaggcggtcatcagcttgtgatcgcgcaggtgctccgccagtttatgggcgttgtaggtttcgtaaccgaagacctgtgcggtgcccgatttcgccgcggctttgtaagatgcgtccgcaaagtacttgcgcgccgtcccgttcggacggttggccacaccgtacatgccgtctttggcgatttcccagaagccggagtgaatatcgccgatctgcgtgttctcttcctgtttgaacggcaccagcgcgccgttgacgcgggtgctctgcagcaggtgcggcgttttgacggtaccgtcgttgatcagggtgttcagcgccttggccatctggatcggcgtggcggtccagtaaccctggccgatgcccaccggaatggtgtcgccctgataccacggttttttatagcgtttcagcttccattcgcgcgtcggcatcaggccggagcgctcttcggccagatcgatgccggtgtactggccgtaaccgaatttggtcagccagctcgacagccgatcgatccccatatcataggcgacctgatagaagtaggtatccgcggattcttccagcgctttggtgacgttcaggcggccgtgaccccattttttccagtcgcgaaagcgtttttccgagccgggcagttgccaccagccgggatcgaacactacggtgttcttggtgatcacgccggcgctgagtgccgacacggcgatataaggtttcaccgttgacgcgggcggataaaccccctgcgtggcgcggttgatcagcgggcgattcggatcgttcagcagaccctgatagtccttgctggaaatgccgtccacgaacaggttcggatcgtagctcggattggacaccatcgccaggatggcgccggtgcgcggatcgctcaccaccaccgcggcgcggctgccaaccagcagctgttcgatatagcgctgcagatcaagatcgagcgtcagatagacgtcctggccggcggaaggcggctgctcgtgcaattggcggatcacccggccgcggttgttgacttcaacctcttcgtaaccggttttaccgtgcagcgtgtcttcgtaatagcgttcgatgcccagcttgccgatatcgtgggtggcggcgtagttggccagcttgccgtctttgtccagacgctcaacgtcgcggtcgttgatcttcgacacatagccggtgacgtgggtgagggcggatccgtaaggatagtagcggcgctgatagcctttcacttccacgccggggaagcggaactgattgaccgcaaagcgggcgacctgcacctcggtcagcgcggttttcaccggaatggagacgaaacggcgcgagcgcttgcgctctttttcgaaattggcgatgtcgtcgtcagtcagatcgaccaccgtgcgcagcgcctgcagcgtggccttgagatcgtcgaccttctccggcatcagctccagctgataaatggtgcggttgagcgccagcggggtgccgttgcgatcgtagataatgccgcggctgggcgcgatgggcaccagtttgatgcggttttcgttggagcgggtgcggtaatcctcgacgcggaccacttgcagattatacaggttggcgatcaggatgccggacagcaccaggatgaccaggaacgccaccagggcgcggcgtacaaacagggcggattcagccgtatagtcgcgaaaagggttacgttctattttcatcccgctgctttatttcactctgtcacggtcaccaccggctattcccggtggtaaggatgatttgttgtaatactccaggcgcggtagaggctttcggccaccaggacgcgcaccaaaggatgcggcagcgtcaacggagaaagcgaccagctctgctcggcagcggctttgcaggcgggcgccagcccttccgggccgccgatcagcaagctgacattgcggccatcctgcttccagcgctcaagctgctgcgccagctgcggcgtttcccacggcgtgcctgggatatccagcgtaacgatgcggttgcctttgcccaccgccgccagcatctgttcgccttccttgtccagaatgcgcttgatgtcggcatttttgccgcgtttgccggccgggatctcggtcagctcaaacggcatatctttgggaaagcggtgcaggtaatccataaagccggtttgcacccagtctggcattttggtgccgaccgccaccaattgcagtttcaccgcttagctccagagtttttccagctcgtacaggcgacggctttcttcctgcatcacgtgtacgatcacttcgcccagatcgaccacgatccagtcggaggcttcctggcctttcatgccgtacagctccatgcccgcggcgcgggattcctgcaccacgtggctggcgatcgacatcacgtggcgcgttgaggtgccggtgcagatgatcatgcaatcggtgatgctggatttgccctggacgtccagagcgacaatgtcttggcctttcagatcatcgattttatcgatgacgaaatcttggagcgctttaccttgcaaaggttccccctcgggtgtgttctgttcagtcggctgcggcgggcaaaatgcgcgcgtcgcggcgtaaccggataatggtttcggcaggctgccgctgaaagccagctaactggtgactgcccggccagctaaggtttccggggttttcagcggatacctgaaaaatagcggcgcagtatatcacgcacctttcactagcgatataaaccctgcaactcgatatagcgctgcaccgggcgcggcagcaggtcgtcgcagttgaggccctgatggcggcgctggcggatctcggtggcggaaatttccagctccggcgtatcggccagatagatatggccgtgcgggcgacggctgagcagcgccgggtcggcggtgcgatggcgttccagccactgctgcagttccggcgtgtccatgcgatcgttatagcccgggcgcgccagcaccagcaggtggcagacgtccaacagcgcctgccagcggtgccacttatgcagcgtcagcagcgagtcctggccaataataaacgccagcggctgggcggcgccacgctctttacgaatcgtttccaacgtctcgatggtgtaggagggcgtggtgcggtgcagttcgcgatcgtcgaccgcaaacagcgggttgccggcgatcgccagctcgaccatcttcaggcgctgttgcgcattggcctccggctgcgggcggtgcggcggcacatggttaggcagcagcgtgacgcgattcaggcccacttcggcggccagcgcctccaccggccgcaggtggccgtagtggatcggatcaaaggtgccgccgaacagcgcgtgcaaaacggtggggtgttccgggttagtgggcatcgctaaaactcgtggccaggggtttgccgcacagcagcatcgacagggtttccagttccggccagaccgactggccatagtcctgcttgagggtcagctcgatttgcgtcagcagctgtaccgcctgctgcagctgggggccggacaggcgttgcaacgcctgggtcaccaacgggcggcggttctgccagaccttgtgctgatcgaacagcgagcgcagcggcgcagacgccatgcggcgctgcagcgtcagcagcagcagcagttcgcgctgcagggtgcgcagcaggatcaccggctccacgtcctcttgctgcaactgctgcaaaatatgccaggcgcgcttgctcttgccggccagcagggcatccagccagtggaacggcgtgaagtgggcggcgtcgttcaccgcctgctcgacgcgcggcagcgtgagcttgccgtccgggtgcagcagcgacagccgctccagcgcctgcgacagcgccagcaggttgccttcgtagcagtaacacagcagctgattggccgcgtcgtccaactccagcttcatcgctttggcgcgcgcggcgacccagcgcggcagctgcgcctgttcaggcgtctggcaactgacgagagcgccgtgtgggctgagcgccttgaaccaggcgctgttttcctgcgctttggtgaggcgcgggccgcgcaggatcagcaaaatatcctcgtgcagcagcgtggcgagtttgctcaactgctcaccgatcggcgccgtcgggccgttttccgggaagatcagcagcagcgtctggcggctggcgaacaggctcatcgcctggcagatgccgaagatggcgtcccagtcagtatgggcgtcgagggaaatgctgtagtgctcgctgaactgctgctgttgcgcggcctgccggagtaaatcctggctttcctgcagcagcagcggttcattgccgctcaataaataacaagcgcgcagcccctctcggagctgcgcggcaagttgttccggataaatgcggatcattgtgcggtttggcttgccgctcgttcgccggcggcagcggctttctgccggttttcttcttccgccgcgtgcacggtcagcagtttgcgcaccagttgttgcgctgcctgctcacgcatttcctggcgaatgatctcctgttcggagtccttggccagcgcggtcagcgggttgtcgaagaacgaacggaacactttcaccgacagcggatacaggtcgtggcccgggagcagcacctgcgcctgcacggtcagcaccagctggtactcggcggttttaccgtcctggaagatcgaggcggtatcctggctttccgtcgcgccgacgatgcgcagggaaggcacgtctttacgcttcggatcgctgacgatggtcacggcgttcaaacgcagctgctcacgcaccgcgcgcgtcaatggcccgtaaggatccgaactgtccaggatcagcgttttcatttcattaggcacctgcgtggtgccacgcaggtgaaaaccgcagccggcggtgaccagcaccgccaaccccagcaacagcgtcagaatacgttgtcgcacaactcctccttgtgttaacccacaaccaggttaagcagtttgcccggaacgtaaatcactttgcgaatcgtgacgccgtccagatatttagccaccagatgctcttcggcagcgcgcgcgcgcacttgctcttcggtcgcatcggcagatacggtgattttagcgcgaaccttgccgttcacttgcaccaccaccagcttggagtcctcgaccatcgcctgttcgtcggcaaccggccatggcgcggtgtccacgtcgccttcgccgcccagcgcctgccacagggtgaagcacacgtgaggggtgaacggatacagcatgcgcaccacggccagcagcgcttcttgcagcagcgcgcgatcctgctcgctctcctgcggcgcgcgggccagcttgttcatcagctccatcacggcggcgattgcggtgttgaaggtctgacggcggccgatatcgtcggtcactttggcgatggttttgtgcagatcgcggcgcagcgctttctgctcttcgttcagcgacgccacgtccagcggctgcaccgcgcctttttccacgtgatcgtaggccagtttccacacgcgtttcaggaagcggttagccccttccacgccggattcctgccactccagcgtcatttctgccggtgaagcgaacatcatgaacagacgcacggtgtccgcgccgtatttttccaccatctcctgcgggtcgatgccgttgttcttcgacttcgacattttgctcatgccagcatagaccagttcacggccttgcggatccgtagccttgatgatgcggcccttgtcgtcgcgctcgacggtggcgtcaaccggggatacccagacgcgctcgccgctgttgccggtgtagtagaaggcgtcggccagcaccatgccctgacacagcaggcgcttggccggctcatcggaatccaccaggcccgcatcgcgcatcagcttgtggaagaagcggaagtacatcaggtgcatgatggcgtgctcgatgccgccgatatattgatcgaccggcagccagtagttggcggcggccggatccagcatgccctggtcatactgcgggcaggtgtagcgtgcgtagtaccaggaggactccataaaggtgtcgaaggtgtcggtttcgcgcagcgccggctggccgtcgacggtggttttcgcccactcagggtcggccttgatcgggctggtgatgccgtccatgaccacgtcttccggcaggatcaccggcagctggtcttccggcgtcggcattacggtgccgtcttccagcgtcaccatcgggattggcgcgccccagtaacgctggcgggagacaccccagtcgcgcagacggtagttaaccttacgctggcctacgcccttggcgaccagtttgtcggcgatggcgttgaagcccgcttcattgtccagaccgtcgaactcgccggagttgaacagcgcgcctttgtcggtcatcgcttcggcgctcacgtcaggctggctgccgtcgaggttcaggatcaccggtttgatcggcaaatcatatttggtggcgaattcccagtcgcgctggtcgtgcgccggtactgccatcacggcgccggtgccgtattccatcagcacgaagttggcgacccacaccggcagcttctcgccgctcagcgggtggaccacgaacaggccggtcggcatgcctttcttctccatcgtcgccatttcggcttcggccactttggtgttgcggcattcgtcgatgaactcggtcagcgccgggttgttgcgcgcgccctgttgcgccagcgggtggcccgcggcgaccgccacgtaggtggcgcccatgaaggtgtcgggacgggtggtgtaaaccgtcagcttctcttcgctgtccgccacgtcgaaggtgatttccacgccttcggaacggccaatccagttgcgctgcatggttttcacctgctccggccagctttcaagcgtgtccagatcgttcagcagctgatcggcgtaagcggtgattttgatgaaccactgcgggatctctttacgctcgaccttggtgtcgcagcgccagcagcagccgtcgataacctgttcgttggccagcacggtcagatcgtgcgggcaccagttcaccgccgaagtcttcttgtagaccaggcctttttcatacagcttggtgaagaaccactgttcccagcggtagtattccggctggcaggtggcgatttcgcgatcccagtcgtagccgaagcccagcagtttcagctggttcttcatgtattcgatgttgtcgtaggtccacggggccggcgcggtgttgtttttcaccgctgcgccttccgccggcaggccgaacgcatcccagccgatcggctgcagtacgtttttgcccagcatgcgctgatagcgcgagatcacgtcgccgatagtgtagttacgaacgtggcccatgtgcagtcggccggacgggtaaggcagcatggataggcagtagtacttttccttgctgtcgtcttcggtaactttgaaagtctgcttctcttgccagtgaagctgtacgttcgattctatgtcttctggacggtattgctcttgcatggcggccggtggtcctgtaggtgtaaaccgttgccccggtcagaggcaacgcaatgaacatttagtattcgtagatccgcatagcatagctgataagacctcccggcaacaactccaagcgcctgactcggcgcatttaaaaaaaacgccgtcatgacgcggctcacaacctgcggatcccgcgtcttgccaagtgacatcagtcatttacggctaaaataagaacaagtagcttaggggggatccctacagccaagtccggcgcagcgtttattgaggagagtctatgaacaaggttgctcagtattaccgcgaattggtggcatcgctgagcgaacgcctgaaaaacggcgaacgcgatatcgatgaactggtggccagcgcggagcggcgcttgaacgaggccgaagatctgacgcgcgacgaagtgcggcaggtgacgcaggcggtgcggcgcgatctggaggagttcgctcgcagctatcaggagagccgggacgagtttaccgacagcgtgtttatgcgcgtgatcaaagagagcctgtggcaggaactggcggatatcaccgacaaaacccagctggagtggcgcgaggtgttcaaggatgtcagccaccacggcgtttaccacagcggtgaagtggtggggctgggcaatctggtgtgcgagcagtgtcactaccatttggcgttttacacgccggaggtgctgccgctctgcccgaaatgcggtcacgaccagttccagcgtcggccgtttgaaccttgatgacgttccccgccagggcggggaacgctaaggccggcgtttaacggaacagtttcttcagcaggttgctcaggaaaccgccgctgacggttgccggggcaacgtccgcctgcgccggtgcgctggccggtacggcgacgccggccgggattttttgcacgactgcgatgcggctgtcctgggcggctttctccgccgcttccgggccataggcgaagccttccgccagcacgaattcaacgtcggtgatgccgataaagcccaggaacaacttcacgtacggcgtgatcagatccgtcggcgtgtcggcgtggatgccaccgcggctggagatgacgatcgctttcttgcccgtcaccagcccttcggcgccggcggaggtatagcggaacgtctggccggcgcgggcgataagatcgaagtagatcttcagctgcgtcgggatgttgaagttgtacatcggggcgctgatgatcagcgtgtcgtgcgatttcagctcggcaatcagctcatcggacagcgccagggtgctttgctgatgcggcgtcagcggtttgtcgccggcggtaaagccggccatcacttcaccatccagctccggcagcgttgggttggccaaatcgcgcacggtgaacgtgtcttcagggtgagtttcacgccattgttcaacaaaaaaatcgactaattttccagactgggaatattcacccagaatgcttgatttcaggaccagtacgcggctcattggcttatctccaggcgaaggctaatcggtaacgatgtcagtcggtgtaaacacatggtagaggcaagccatgaacagtgatagcgcaaaaattcgctgagttaaatcaaaaaagttgaacgaggggcgcgagcgcgccccgataggatcaataacgcgctacgcgctcggccagcagatcgataaagccctcgcggttgatgccggtcagcacttccacgttggccgcgttgccggtttgctggaaatagtccaccaccgtcatgccgacggtgtattcccctttggtctccacgccgacccagcgttctacgccggtgaacagctgtggcgccagcagccaggcgatggtgcagggatcgtgcatcgctgcgccgggcaggccgcgcggatggctgaggtacagcggcagataaaaatcgagcatctccgcgaccgcctgcgcgaccggattgtctatctgacgaatgcgctcgatatcctgcggcaacaccagcgcctgatgggtgacgttcagcccggccatggtcagcggtacgccggatttcagcaccatttcggcggcttcgggatcgacgaagatgttgaactccgccaccggcgtagtattgccggcgttcatgccgccgcccatgaatacgatgcgctcgatgcggcttttcaactcggcatgctgggccagtagcagggcgatattggtcatcgggccggtcaccaccagggttatcggctgtgggctggcgcgcagcaggtcggcgatcagctcgacggcgccgcggggatcgggtttgagggtcggcgtcggcaggtgggtgttgcccatgccggttttgccgtggacatagtcggcgatcaccagctcgcgcatcagcgggccgccggcgccggcggcgaccgggatgtcctcgcgctgcatcagggtcagcaggcccagcgcattatgcagggttttctccggcgtctggttgccggcggaggtggtaatggctttgacgtccagctccggcgaacgcagcgccatggccagcgcgatggcgtcgtcgaggccgggatcgcaatcgatgataatagggcggggcatgttctttctcctctgtttgttatccagcgagcatcggatcaaaaccggggagaaacaagcgcttttagtgccgggagaaaagatgcgcccctggcggggcgcatcgagagcgtttagtgcaggatcttggccaggaagtccttggcgcgatcggactcggggttgttgaagaaatcgtctttgttgcggtcttcgacgattttgccttcgtccataaagattacccgattcgccaccttgcgggcgaagcccatttcgtgggttaccaccatcatggtcatgccttcgttcgccagttcgaccatcacgtccagcacttcgttgatcatttccggatcgagcgccgaggtcggttcatcgaacagcatggcgataggatccatgcacagtgcgcgggcgatggcgacgcgctgctgctggccgccggacagctggccggggaacttgttggcatgggcggagaggccgacgcgttccagcagcttcaggcccttctcgcgtgaggcggtcttgtcgcgcttgagcactttcacctgcgccagcgtcaggttgtcgatgatagacaggtgcgggaacagctcaaagtgttggaacaccatgccgactttggcacgcagctgcgccaggttggttttcttgtcgttgaccgaggtgccgttcaccaggatgcttccctgctggatcggctccaggccgttgacggttttgatcagggtggatttgccggaacctgaaggaccgcagacgacgaccacttcgccttttttcacttcggtggtgcaatcggtcaacacttggaagtgaccgtaccacttggaaacatttttcagggatatcatcaaacagtccttttcttcaaatagcttaccagcgcagaggcggcgaggctgataacaaaatagacaaaaccggcgaacaggatcatttcaacctgggtgccgtcgcgttcgccgatggtcgacgcggtgcggaagaagtcggccaggctcagtacgtaaaccagcgaggtatcctggaacagtacgatgccctgggtcagcagcagtggcaccatggcgcggaacgcctgcggcaggatcaccagccgcatggactgccagtgggtcatgcccagcgccagcgcggcggaggattggccacgcgagatgctgatgataccggcgcggatgatttccgagtaataggccgcttcaaacagggaaaaggctaccatagccgagatcaggcgaatatcggttttcggcgacagccctagaacctgttgtaataagcttggaaccaccagatagaaccacagcagcaccatcaccagcggcaccgaacggaacaggttgacgtacagggtggcgaaccagcttatcggcttgaacggcgacagacgcatcaccgccagcacggtgccccacaggatgccgaccacgatggcggtcacggtgatcttcagcgtgatcgccatgccttgcagcagataagggaagcttgggacgatcgacgcccagtcaaattcgtacattatttactccccaggttgccaggcaactgcactttcttttcgaccagacgcataaacagcatgataacggcgttgatgccgatataagccagcgtgatggcggtaaaggattcataggcgtgtgcggagtaatccaacagcttaccggcctgcgcggccatgtccaccagcccgatggtggaggcgatggcggagtttttgaccaggttgagcatttccgaggtcatcggcggcacgatcacccggtaggcgttcggcagcagcacgtagcggtaggtttgcggcagcgtcaggcccatcgccagcccggcggctttctggccgcgcggcagggactgaatggcggcgcgcacctgttcgcaaacgcgggcggcggtaaacagccccagacagagcatggaagagacgaagaactgcacgttgggatccagctcggttttgaaccaggtgccgatattggccggcagcagctcggggatcaccagataccaggtaaagaattgcacgatcagcggcacgttgcggaacagttcgacgtaacaggtgccgagggtggaaagaaagcggttgggcacggtacgcaagataccgaacagtgaaccgacgaagaaagcgataatccaggcacagacggagagggccaccgtgacctgaaagccggaccagatccagccgaggtaagtggtgttcccaaacggggcctgctgcaggaagataccccagttccaatctattgacataacaaactccgataaacgggcgcagggcgccgaagattgatgacttgatgagcgccgatcgccgcgcggccagtctggctggcttgttgtgtacgggtgtcggtgatgcgccttggggaaaatgagggaggggaacggcccccctcattcctgtctgtcccagtcatcaactgggccggtttggcctggcggccgcgccggcttttgttctatttagttcaacgctttgtcgtttggctctttgaacagttgcttcatgtcgtccgacagttcgaagttcatgttgaggtttttcggtggaataggctgcttgaaccatttctcaaaccacttggccgcttcaccggaggtttgcgcctgggcgatggtgtcatcgaccagctttttaaactcaggatcgtctttgcgcagcatgcagccgtaggcctctttcgactgcggcgtgccgatgatttcccactgatccggtttcttggccttggcgcgttcgcccgccagcagggcatcatccatcatgaaggccacggcgcggccgctttccagcgtgcggaaggaatcgccgtggtctttggcgctgatgatgcgcatgttcatcttgtcgctgtcgttcagcttgttcagcagcacttcggaggtggtgccggaggtgaccaccaccggtttgccggccaggtctttaaagtctttgatgtcggagccctttttcaccagcaagcgggtgccgaccacgaaaatggtgtcggagaaggcggcctgtttctggcgctcgaggttattggtggtggatccgcactcgaaatcataggtgccgttttgcagcagcgggatgcggttctgcgaggtaatcggcagcattttcacctgcagattcggcgcattcagctttttcttaacggcttcaacgatttggttggagtagtcctgagagtagcccacaactttttgttggttgtcgtagtaggagaacggcactgacgattcgcggtggccgacaacgatcacgccattgtctttgattttcttcagcgtaccggtcaggtcttccgcatgcgccacgctacctgccgcaccgagcagcagtaacgataacgccaatttacgcatttgcatggtccaactcctttgctgttgttgtggctctgactaaagagcgtcaggttaaatcgactgtttattgctcaagttataaagatagtcttatgaactgaacgctgttaaaaaataaccgattgtgaacaccttgaaactaaaatgtttcattttttgagacgccgcgcgcaccaaatcaatgcaacaaaacgtcggcgcacccgcgcggtgcgcttaatgcacccaaaatgtgcgtaggtgcgacaaaacgtcagcaaaagtaaaccggcgcgcgatgtcgccatagataaaagcaaggagtgtgccagccgcgttgatttaacgacgttttctgactgaggcggggatattgacgggaacgcggggcgcggcgggcgcgccccggcgaagaggattatttgcggcgcaagcccaacatcagcgcccagccgcccagcagcagggtaatcacccacagcggtgtggcgccgaaacgcgcataaggcgtgacgccggtggtcggcgtgaccttcacttcgagcacctggcgggtaaactgcgggatctcggcgatcacctcgccgttggcatccaccgcggcggtgacgccgttattggtgctgcgcagcagcggccggccgagctccagcgcccgcatgcgcgccatctggaagtgctgccacgggccgatggagtggccgaaccaggcgtcgttggagatggtcagcaggaagttggtgtccgggcggaagttatcgcgcacctgctggcccagcacgatctcgtaacagatggccgccgtcaggttgtagccgcgtacgctgagctgcggctgcacgtagtcgccgcggctgaaaccggacatcggcagattgaagaacggcgcgatagggcgcagcagttcacccagcggcacaaactcgccgaatggcaccaggtgatgcttgttgtagcgatctttggccgggtagctgtacggcgtcggttcgcccagcacgatggcgctgttgtattcctgcacgccttgtggggtggcgcgcgcatcgacgatgccggtgatcaggctgctgttcttcgcccgcatcaggtcatccatcatggtcaggaagccgttctgacgcggctcgaagtcagggatggcggactctggccagatgatgatcggcgccttgcccatgtaggggcgggtttcgtccagataggtttgcagcgtgctgagcagaatgctcggatcccacttcattgactggggaatgttgccttgcaccatggcgacgttcaccgctttctccggctgcggggtaaaccactgcagctggcgcagcggccacggcaacagcagcagcgcggcggcgatcacggctgccgacaggcgccgttgattgacggcgtacaccagcaggccggcgatggccatcagcacaaaggtgatggcgtcaacacccagcagcggcgcgatgcccttcagcgggccgttgatctggctgtagccgaactgcagccacgggaagccggtcagcacccagccgcgcaggaattcggtcacctgccacagcgccggcgcggcgatggccagccgccaccaactggtggccggccacaggcgcgtcagcagcccggcgaacagcccggtgtacagcgacaggtaagcggcgagcagcaccaccaggaagacgttgacggcgaacggcatgccgccgaaatcggcgatgctgacatacacccagttgatgccgctgccgaacagcccgaagccccagacaaagccgagcagggcggactgtttggtggtgcgattgagggtaacggccagcaggccgaacagggagacgatggccgcgggccagaagtcgtagggcgagaacgccagcgtcccgccggcacctgacaacagcgccagcagggcgcgaacccgctggcgttcaagtaatgaggctttagccatgttggatttaatcttccagtttcggtggtggagaatcgtccggaatttttacatgaacctggatgatacgtcgactgtcggccatggcaactttaaataggtaaccttcgatttcaatggtttccccgcgcgccggcaggtggccgaaggcctgcatcaccagaccgccgatggtatcgacctcgtcatcgctgaagtgggtgccgaaggcttcgttgaagtcttcgatcggggccagcgcgcgcacggtgtacatgtggcggctgagctggcggatatccagatcgtcttcgtcgtcgtattcgtcttcgatctcgccgacgatcagttccaggatatcttcgatggtgaccaggccggacacgccgccgaattcgtcaatgacaatcgccatgtgatagcgctgggagcggaattctttcagcatccggtcgacgcgcttgctttccggcaccaccaccgcggtgcgcagcaccttgtcgatgctgaacggctcggaatctgcgcgcatgaacggcagcagatccttggccatcaggatgccttcgatgtgatctttgtcttcgctgatcaccgggaaacgcgagtgggcggagtcgataatcacgtccaggcactcttccagcgtctggttgcgcttgagcgtcaccatctgggagcgggggatcatgatgtcgcgcacgcgctgttcggcgatatccatcacgccttccagcatgtcgcgggtatcgggatcgatcaggtcgttttgttcggaatcgcggatcagctcgaccagatcgccacggtttttgggctcgccgtggaacaactggttaaggataagagtaaagaaccccttcttgggactggggctgtcattgctttgtgaatggtcgtcgctcatggcgttttcgttactgtcactcatgtcagagttaaggggcgtcagcgacagccccgcagaggggctgtagggtaaacggctgacgtcagacggggtctttttccgccaggtacggatcaggatagcccagtccgtgcatgatttcggtttccaaagactccatttcttcggcttcatcgtcttcgatgtggtcataccctagcagatggaggctgccgtggacaaccatatgcgcccagtgggcctccagcgccttgccttgctcaatcgcttcctgttcaaccacctggcggcagatgatcagatcgccgagcagcggcagctcgatgcccggcggggcttcgaacgggaaagagagcacgttggtcggtttgtctttgccgcggtaggtcaggttcagctcgtggctttccgcttcgtccaccagacgcacggtcacctcggcctcttcctgaaattgcggcagcacgccttccagccagcgctggaaggtggcctcgtccggcaggccgtcgctgctttcacaggcaatctgcagatccaaaatcacctggctcatggtgtctcctgctcggaggcggcgagcgcctcgcgcttacgttgttcggcaatcgcgtctttgcgtttctgttcggccgcttcccaggcctcataggcgatgaccacgcgggccaccaccgggtggcgcaccacgtcttcgctgtggaagaagttgaagctcagctcttccacgtccgacagcacttccaccgcgtggcgcaggccggatttctggttgcgcggcaggtcgatctgggtgacgtcgccggtgatgaccgccttcgagttgaaaccgatgcgcgtcaggaacatcttcatctgttcgatggtggtgttctggctctcatccagaatgataaaggcgtcgttcagcgtgcggccgcgcatataggccagcggcgcgacttcgatcacgttgcgttcgatgagcttctccacgcgctcgaagcccagcatttcgaacagggcgtcgtacagcgggcgcagataaggatcgaccttctggctcagatcgcccggcaggaagcccagcttttcgccggcttcgaccgcgggacgggtcagcagaatgcggcgaatttcctggcgttccagcgcatccaccgcggcggcgaccgccaggtaggttttgccggtgcccgccgggccgatgccgaaggtgatgtcgtgatcgagaatgttggcgatgtattgcgcctggttaggcgtgcgcggtttcaccatgccgcgcttggttttaatggtgaccgccttgccgtaatccggcacgctgtcggccacctgttccagcacccggctctctttgatcgccagatggatttgctccggatcgatatccgggatcacgccgcgaatcggcgcggtatccacgtaaagatggcgcaggatatcggcggcggcgaccacgcacaggttcttgccgaccagcttgaaacggttgtcgcggcgattgatttcgatgcccaatcggcgctcgagttgcttgatgttgtcatcaaacgggccgcacaggctgagcaaacgctggttgtctgcgggctctaacaaaatttcttgtgttgcgacgttcaaactattcctctaggtcacatcgggcctggttgatgtcacatagcgcgtccgggacgcgcgcgttcaggacgagcctgaatactctctttcttgaattattcatggtgcgccgcaacggcgcaagtttaccgctgatctatctgtgcgccgtcggcggaattcaagggaagacaaggaaaaaacgcggcggggcgcaaagcccgccgcgtcatcacaggacaagatcgctgggaatcagttctttttcacgaattcggatttcagtttcatcgggccgaaaccgtcgattttgcagtcgatgttgtgatcgccttccaccagacgaatgtttttcaccttggtgccgattttcagcatcgaggaactgcctttgaccttcaggtccttgatcacggtgaccgcgtcgccgtccgccagcaggttgccgttggcgtctttgacgatcagcgcgtcctgatcttccgccggggcgctgtcgctccactcatgggcgcactcagggcagatgaacagggcattgtcctggtaggtgtattcggagttgcacttcgggcagtgtgggagttgcatgttatgtcgcctcttcaacaataaaaaaataaaaaaagaacatcaccgggcgcggacgcccggcggagaaacggtaaggagtagcgcgaacgggcggcgataaggcggccgccgcggcgtcagggctggtaaatgccgacgcccagcgcgttttctttgcgggtacgggcgatcaccgactgcggggattcatgtacgcgcagatccatctgctgctcggtgcgcaccactgcgccacgcagggtgttggtcagcacctcggtaatttccacgtcgacaaactggccgatcatgtcgggcgtgccttcgaagtttaccacacggttgcattccgtgcgcccggccagttccatcacgcttttgcgcgaggtgccttccaccagaatgcgctggacggtgccgagcatgcggcggctgaactgcagcgcctgctggttgatgcgatcctgcagaatgtacagccgctgctttttctcttcttcgctgacgtcgtcaaccatgtccgccgccggggtgcccgggcgcgacgaatagatgaagctgaagctgacgtcgaagttgacgtcggcgatcaggttcatggtctgttcaaagtcggcctggctctcgcccgggaaaccgacgatgaaatcggagctgagctgaatgttcgggcgcgccttgcgcagcttgcggataatcgccttgtactccagcgcggtatgcgcgcgtttcatcatggtcaggatgcgatccgaaccgctctgcaccggcagatgcaggaagctgaccagctccggcgtgtcttcgtacaccgcgatgatatcgtcggtgaactcgatcgggtggctggtggtgaagcgaatgcgatcgatgccgtcgatggccgccaccaggcgcagcagttcggcgaacgagcagatatcgccgtcatgcgtggcgccgcggtaagcgttgacgttttggccgagcaggttgacctcgcgcacgccctgcgccgccagctgggcgatttcgaacagcacgtcgtcgctcggacggctcacttcttcaccgcgggtgtaaggcaccacgcagaaagtgcagtatttgttgcagccttccatgatcgacacgaacgcggtcgggccttcggcgcgcggttccggcaaacggtcgaatttttcgatctccgggaagctgatgtcgaccaccgggctgcgggtgccctgaacgtggttgatcatttccggcaggcggtgcaaggtctgcgggccgaataccacgtcgacgcagggcgcgcggctgcggatcagttccccttcttgcgaggccacgcaaccgccgaccccgatgatgacagacgggtttttttctttcagcaagcgccagcgccccagcatggcgaaaactttctcctgcgctttttcgcggatcgagcaggtgttcagcaacagcacgtccgcttcttcggcgttgtcggtccactcgaagccgtgcgtgctgttcaacaggtcggccattttcgatgaatcgtactcattcatctggcagccccaggttttgatatgtagttttttcgtcattgacttgccattactcagtgcggagcgaaagttgcgttacgcgacatgcagggcgcgtattgtaatcatttgccgccgttgtgaccagcgcgggggaaaatggcacgcaacctgaagccgaagcgaaaatccggtacactgcgcaaaacgccatgccgggtgggatggtgagcattcacacagaaaacatagccaatatgaagacatctcaaaatcggtatgacgcggtggtggtgggcggcggtatggtcggcgcggcggcggccctcgggctggcgcaggcgggctggtcggtggcgttgctggaacatcaggcgccgcaggcgttcgaggcgcaaagcccgccggacctgcgcatttccgctatcggctgcacctcggtggggctgctgaaacagctcggcgcctggccggccgtgacggcgatgcgcacggcgccgtatcgccggctggagacctgggaatgggcatcgtcgcgggtggcgttcgacgcggtgtcactggggctgccggagctgggctttatggtggaaaaccgtattctgcagttggcgctgtggcagcagttcgcgcagtgcgccaatctgacgttgctgtgccccgccaggctgcaatcgctgcagcgggcggacaaggcctggcagttgacgctggacagcggtgaaacgctgcaggcgcggctggttatcggcgccgatggcgccaactcgcaggtgcgcaagctggcggcgatcggcaccaacggctggcagtatcgtcaggcgtgcatgttgatcaccgtcgataccggcgcgccgcagcaggatgtgacctggcagcgcttcttcccgtccgggccgcgcgcctttctgccgctgtacgacagctgggcatcgctggtgtggtatgacagcccgcagcgcattcgccagctgcaggcgatgccgccggcgcagctggagcgtgagatcgccaccgctttcccggcgcggctgggcccggtcaaggtgcacgccgccggatcgttcccgctgacgcggcgtcatgcgcagcgttacgtgctgccggggctggcgctgctgggggatgcggcacataccatcaacccgctggccgggcagggcgtcaatctgggatatcgcgacgtggatgccttgctgagcgtgttgagcgaggcgcgggagcagggagaggactggagcagcgaggcggtgctgctgcgttatcagcgccgtcgccgtaccgacaatctgctgatgcagagcggcatggatctattttataccgccttcagcaataacctggctccgctgaacgtggcgcgcaatctggcgctgatggccgcgcagcgggcgggcaagctgaaagaacatgcgttgaagtacgcgttaggattgtaaccgacagggctcagcggcggctgggcctattaaggatggctgaacgccagacagcaaaaagcccgccgaagcgggcttttctaaatatggctggggtgccaggattcgaacctgggtatgctggtatcagaaaccagagccttaccgcttggcgacaccccaattatggtggctacgacgggatttgaacctgtgaccccatcattatgagtgatgtgctctaaccagctgagctacgtagccgatgttactttttacttctttgatttgcaagcagtttgttatggctggggtacctggattcgaaccagggaatgccggtatcaaaaaccggtgccttaccgcttggcgataccccacctgcaaacaaatcttatgttgaaaccccgttcccgaaagaatatggctggggtacctggattcgaaccagggaatgccggtatcaaaaaccggtgccttaccgcttggcgataccccatcaacatactgcgccgacgatgaagagaaatggtgcgggaggcgagacttgaactcgcacaccttgcggcgccagaacctaaatctggtgcgtctaccaatttcgccactcccgcaaatgcaaaaaagagatggtggctacgacgggattcgaacctgtgaccccatcattatgagtgatgtgctctaaccagctgagctacgtagccctctttttttgctttgccttcatcggcgttgcggggcgcattatgcgtatatgaccgatttgcgtcaacaagttttttcccgaaaaagcgcccggaagcgccgtttgtctgggttgtgaacattatggcgataaaatcggcaattcaggcagttggcgggcggaaaaggcaacaaaaaggcgggccaaaaggcccgccccaagggaaaacgccgcgcgtttatttataggcggcctggtgcacgccgacggcgcggccggaaggatcgtccatcttcttgaacgattcatcccattcgatggccttggcggacgagcaggcgacggatgggccgcccggcacgcattcggcggcgctcggcagcgggaacagctcttcgaagatctcgcggtacaggtagccttctttcgaggtcggcgtgttgtacgggaagcggaaacgcgcggtttcgagctgttgatcgctgatttgctgcgcagccacctcttttagcgtgtcgatccagctgtagccgacgccgtcggagaactgctctttctggcgccaggccacgctggccggcaaataggactcgaaacattcgcgaacgatgtgtttttccattttgccgttgccgcacattttatctttcgggttgatgcgcatcgccacgtcgaggaatttcttgtccaggaacggcacgcgggcttcgacgccccaggcggacatcgccttgttggcgcgcgcgcagtcgaacatgtgcagcgccagcagtttgcgtacggtctcttcgtggaattcgcgggcgtccggcgccttatggaagtacaggtagccgccgaacacttcgtccgcgccttcaccggaaagcaccatcttgatgcccatcgccttgattttgcgcgacatcaggtacattggcgtcgaggcgcgaatggtggtgacgtcgtaggtttcgatgtgataaatcacgtcgcggatggcgtccaggccttcctgtacggtgaagtggatttcatggtgcacggtgcccagatggttggccacctcttgcgcggcgcgcagatccggcgagccctccaggccgacggcgaaggagtgcagctgtggccaccaggcctcgctgcgttcctgatcttccacgcggcgcgcggcgtacttcttggtgatcgccgaaatgaccgaggaatccagcccgcccgacagcagcacgccgtaaggtacgtcggacatcaggtggcttttcaccgactcttccagcgcggtgcgcagggtggcggcgtcggtcacgttgtccttgacgctgtcgtaatcgaaccaatcgcggcgataatattcacgaatctcaccgtcctggctccacaggtagctgccggccgggaattccttgatggtgcggcacaccggcaccagcgctttcatttccgaggcgacgtacaggttgccgtgctcgtcgtggcccatgtacagcggaatgatgcccaggtgatcgcggccgatcaggtaggcgtctttttcggtgtcatacagggcgaaggcgaacatgccttgcagatcgtcgaggaagtccgggcctttctcctggtacagcgccaggatcacttcacagtcggaaccggtctggaacgcgtagcgttcgctcagctgttggcgcagcgcctgatggttgtaaatttcgccgttgaccgccagaacgtgggtgtgcgcagcgttgtacagcggttgagcgccattgttgacgtcgacgatcgacaggcgttcgtgagccagaatggctttgtcgctggcgtaaacgccggaccaatccgggccgcggtggcgcatcagacgtgacagctccagcgctttcttacgcagttcaacgggatcggacttcagatcgagcacaccgaaaatagaacacatacaactctcctaacgggcttttatgactgtgatgttgttttttactgttatgggcagcattgccgatttatcagcgataacccggttttgctgcgctgtggttatgaaaatgcgtcaaaagctgcgggagatgcaagcgttttagccatgcgttgagaaatagttgtttgcttaggtgtggtttttaacggatgttcagttatcgacgtgaaaaattatcgattatgcaatttttagcgtgatggcgggattgccggccagtttggccggcaatcgattagcgattaggcgatgagctgccacagggtgaaggcggcgtccggcgtccagccggcgttggaggtgtgcgcctggatacaggtatatttcttgcctttatagctcaccacgtcgccagccttgtaactgtggttgttctgccactcgggcgcccccggatcgggcggcgtgccgtcgttggcggttttgaccgccagcgcgctgctcggcagcgaggtattgccctggctatcggtcgcggtaacgaagtagctgtactgggtcgccggcgtcagaccgccgtcagccagcgacagaccggcggtctggccgatcgggttgccgttgcggtagacggtgtaactggcgatcgggaaagcgccggtggcggcggcccagctcagtttcagcgaggtggcgcccagttcggcgaccgtcagcgccgtcggcgcattaggctttcccggcggcggggtgacgccgccctgaatcagcggcgcatagcgggttttgaactcccaattgtaggcgacgccggctttgctcttgccgttatcccagttgattgaccaggtcatcaggcccttgatcgacaggtttttggcgtcgagacgcgagaaagcgttatacaccgcctgtttgttgaccacgtagccggtggcggcggcatcgttgttgctcggcaggccgatgacgaatttcgccgccgggatcttcgcatagccgcgggtgccggtaaccaggctttccgtcaggtagtagaggaagtcctctttcatggcgtcgttattctgcgtgatccaggcattgagttcatccacccaaataccgtcgccgccctggttataatattgcggcgcgataaagtcgtaatagccttcgagggcattaatataatccaggtaggtgccgttggtgcgtaaatacgggaattccggcgccatgctgataataaagttttttccctgcgcggcgtaatggtcttttacttttttcaacgccgcaggcaagacggttttattattggcggcgccgatcgccgcctgttccagatcgatatccaggccgtcgaagccatagacttccaccaggcgaataatctcgtctttcagcttgtcttcgtcgccggttttcagctcgatatgcgcatctgcgccgccgagggagatcagcaccgcgcggccctggctgttcagcacgcccacctggcggcggaactcggtgtcggacaggttgtaaggcttgaaggtcgggatgccctggcctttcataaaggcgacggccaccacgttgtactcggtgggaatgtcggtcaggttcatattggcgaactgcccttgctggtagccgtcactggcgccggcggcccagttgtgccagaaacccatcaggatctttttattggcgatagacggcataatggccgcgtcatcggcggcgacggcattaataatgttatttgtgctcatggtagcctcattaattaggggtaagggttttccgctcgccggcaatatcagctattggcggggcgtaacgttataatgaggatttttaacgcaggcaggctgaaaccttttacggccatgaacgaattaaattcaaactgacgctgggggagaaggaaataacggcggccgggcggccgccatggtcgcatcagaagatggtgatatcggcgacggaagggtaaacgtagctcgggcggaacggcatggtttcgatgtcgctcagcgtggagacgccggacagcaccagcacggtttccaggccggcctggaagcccgccagaatgtcggtgcgcaggttgtcgccgacgatcaccgtctcttccgagtgcgcctgcattttgttcagtgcggcgcgaatgatccacgggctgggcttgccgacataaaacggcttgcggccggtgatcttctcgatgggcgcgcacagggcaccgcaggccggcgagaagccgtggccgtggctatccggattagtcgcgataaagcgcgcgccgttactgacgaagtaggcggctttgtgcatcatgtcccagttgtaagagcgggtttcaccgacgatcacaaaatccgggttgatgtcggtgatggtgaaaccggctttgtacagctcatggatcagcgcgccttcgccgaccacataggcttttttaccttcctgacggcgcaggaagtcggcggtggccatcgccgaggtatagaacgcgctctccggcacttccagcccggcggcggcgaagcggttcgccaaatcctgtgcggtctgtgatgggtagttggtcagcaccaccagcggcatgccttgttcctggatgcgcgccaggaacagatcggcgccgggcaccggcgtattgtcatgcagcagcacgccgtcgatatcgcatataacgtttttgattttcatttgtcgctgtttctcatgattacggcaggcaagaagtgacgataacacacctgccagaagcggcggatcagctttccagcaatcgctgcaagagcacgccgttgagcatcgcgcgtttggccagggcgaaagcgccgatcgccgagcgatgattgagttcggaggtcaccaccggcagatttttgcggaagtccttcagcacctgggtattgatgcagctctggatcgccggcagcagcaccttgtccgcttcggtgatctcaccggcgatcaccaccttctgcggattgaacaggttgatggcgatggccaccgccttgcccagatagcggccgacgtgttcgatcacttcgctggccagcagatcgccgcggttggcggccttgcagatggcgttgatgccgcagtcttctagcgtcagtttgctcgggtagccctggctcagcagctggcgcacgcgctgttcgatcgccgcgttggcggccaccgtttccaggcagccgaagttgccgcagtggcagcgttcgccgagcggatcgatctggatatggccgatctcgccgacgttgccgttgttgccgagaaaaatctgcccgttgacgatgatgccggcgccggtgccacggtgcaggcgcaccagaatcgagtcttcacagtcgcgggtggcgccgaagtagtgctccgccagcgccaggctgcggatgtcgtggccgacgaagctggtgacgttgaagcgctgctgcaggttgtctaccagcgcccagttgctgacgctgatgtgcggcatatagcgcaccacgcccagcgccggatccaccaggccaggcaggatcaccgcgatggcgatcagttcgcgcaggcggcgctggttcgcttcaatgaattgggcgatggcggcaaacagcgcattctccagcgtttcctgggtgcgttccggaagcggatagtgttcttcgctgagcgatttaccgctcatgtcatacagggtgatggtggcgtcgtggcggccgagacgcaccgcgacggtatggaaatgacgggtttccgacacgatggagatcgcgcggcggccgccggtggaggcttgctgatcgacttctttgatcagcccgcgctccagcagctggcgagtaatcttagtgacgctggcgggggcgagctggctgagttcggcgatttgaatgcgcgagatcgggccctgttggtcgatcaggcgataaactgccgcgccgttaagttgtttgactaagtcaacgttccctatttgtgcttgtccgccagtgctcatcaataatgttactcgctgttcattgaattaaacctcgttaccgttaacgagcgttttggtgatcttgaaatcacgggtgaaggcggtcaggttagccaccttgccggcttcgatggtgcccagacggcgatcggcgccgatcgcgcgcgccgggtacagcgtcgccatgcgcagcgcttcgtccagcgcgatgccgatatgctcgacgctgttttgcaccgcttcgatcatggtcagcgcggaaccgctcagggtgccgttctcatccacgcacagcccgtcccgatagtatattgttttaccggcgaaaataaattggtcaatatctgcacccgccggtgcggtcgcgtcggtgaccaagaccaatttatcacctttcaggcgtttggcgttacggatactcgcccaggccacgtgatggccgtcggcgatgatgccggtatagacctccggcgtatcgaagatagcccccatcagccccggttcgcggccggtgatatacggcatggcgttgtacaggtgggtggcgaagctgataccggcggcgaagccggtgcgcgcctgatcgtaggtggcgttcgagtggccggcggagaccacgatgccggcctcggtcagctgcttgataaagtgcggctcaaccatttccggcgccagcgtcaccttggtgatcacgtcggcgttggcgcacaggtaatcgatcatgtcctgggtcggcttgcgaatgaacgccgggttgtgggtgccttttttcaccgggctgagatacggcccttccaggtgcaggcccaacgcctgattttggtgctttttcagataagcgcgcatcacgtcgacgctatgcttcatgaattcgtcgctgctggtgatcagcgtcggcagatagctggtgcagccggatttctcattggcgcgctgcatgatctccagcgtttcttccgagatcgcttccagcgaatcgttgaactggacgccgccgcagccgttcagctgcacgtcgataagcccgggggccaggatggcgccacccaggtcgcgcgtttcgatgccggcgggcaattcagccaccgggcagactttctcgatcagcccatcagcgataatgactgcatggtcatcaagtacgtcgtggccggtatagattcggccgtgggttaaagcgaacatcgtagccccctgcaaagattaaagacttttcacgctttccgcttctaactcgcggaagtatttgacggttttgactttcagttccatggtggccggttcgtcgcacaccaccaccgctttggcgtgcagctgcaggcagctgatggtccacatgtggttgatgttgccttccaccgcggcttccagcgcctgcgccttggcgtggccggtcaccaggatcatcacttcttccgcgtccaacagcgtgcccacgccgacggtcagcgcatatttcggcaccaggctgacgtcgccgccgaagaagcgcgagttggcgatgcgggtgtcttcggtcagcgttttgatgcgggtgcgcgaagccagggacgaagccggctcgttgaacgcgatatggccgtcgatgcccacgccgcccataaacaggttaattttgccgtaagacttgatcttctcttcgtactggcggcactcggcgtcgacatccgcggcgttgccgttcagcaggttgatgttttcacgaggaatatcaacgtgatcaaagaagttgcggtacatgaaggtgtggtagctttccgggtgttcctgcggcaggccaacgtactcgtccatgttgaaagtcacaacatgcttaaagcttacttcacctgctttgtgcatcgcaatcagatgtttgtaggcttccagcggcgtgccgccggtaggcaggccgagtacaaacgggcgctctgcggttggcttgaatgcgttgatgcgttgaacgatatgacgcgcggcccatttgccgacttgtgcggtatctttcagtgggataagtctcatctaacacctcttgggataagtaaactaaagctatactgtacgggcctgcgggagtcctaagcgtaacccagctttatgattctcgcgtgaatcgtccgtccggttgattttttgaatgataaaataagttttgtgtgatggccagcaatctgggaggtaaagactactttttggtgatatttatcacaaaaagggaggttttaatttgcgatacaaaataaattttttacactcggcatgagtgatacgtgccatgcgttgtttctaaaaaggtagtgagagctccaaataaactactaatagggtccgtccgcggacaacatagggggaaaaggtgaacattcttagttatttgcaaaaggtgggacgggcgctgatggtgccggtcgccacgctgcccgccgccgccatcttgatgggcgtcgggtactggattgaccctgttggttggggcggcgacaacgcgctcgccgctttcttcattaaatccggctccgctatcatcgacaacatgtcggtgctgttcgctatcggcgtggcctacggcatgtccaaagacaaggacggtgccgccgcgttgaccggcttcgtcggcttcctggtgctgaccaccctctgttcgccggccgccgtgtcgatgattcagaagatcccgctggatcaggtgcctgccgcgttcggcaagatccagaaccagttcgtcggtattctggtgggcatcatttccgccgaagtgtacaaccgcttcagcggcgtcgagctgcctaaggcgctgtcgttcttcagcggccgccgcctggtgccgatcctcatctccttcctgatgatcctggtcgctttcattctgatgtacatctggccggtgatcttcaacggtctggtgaacttcggtgaacacatccagaaaatgggctcggtcggcgcgggcatctatgccttcttcaaccgcctgctgattccggttggcctgcaccacgcgctgaactcggtgttctggttcgacgtggccggcatcaacgatattcctaacttcctcggtggccagcagtcgatcgaagccggtaaagcggttgtcggcatcaccggccgttatcaggcgggcttcttcccgattatgatgttcggtctgccgggtgcggcgctggccatttatcattgcgcgcgtcctgagaacaaagccaaagtggcgggcatcatgctggcggccgcgttcgccgccttctttaccggtatcaccgaaccgctggaattctccttcatgttcgtggcgccggtgctgtatgtgatccacgccgtgctgaccggtatctcggtgttcatcgccgccagcatgcactggatcgccggtttcggcttcagcgccggcctggtcgatatggtgttgtcgtcccgcaacccgctggcgacccactggtacatgctgatcccgcaaggcctggtgttcttcgtcatctactacgtggtgttccgcttcactatcaacaagttcaacctgatgaccccgggccgcgagctggcggttgccggtgacgaaaccgacggctacgacgtcaacgtcgacagcaacgccggtaaagacgagaacgaaaccaccacgctggcccgtcgctacgtcggcgcgatcggcggctccgacaacctgaccggcatcgatgcctgcatcacccgcctgcgcctgaacgtgaaagactccgcgctggtgaacgacgcgttggcgaaacgcctcggcgcatcgggcgttatccgcctgaacaagcagagcgtgcaagtgatcgtcggcacccgtgccgaacttatcgccagcgcgatgcgcaacgtgatcgcggccggcccggtagcggcagcggcggctccggcggcggcccctgctgcagaagccaaaccgcaggcggtgccgaacgcaccgaaagccgcgtttgaaacgctggtggcgccggtaaccggtgaagtggtggcgctcgatcaggtgccggacgaagccttcgccagcaaggcggtaggcgacggcctggcgattcgcccgaccgacaacatcgtggtgtcgccggctgacggcaccgtggtgaaaatcttcaataccaaccacgccttctgcctggaaaccgacaagggcgctgagatcgtggtgcacatggggatcgacaccgtcgcgctggaaggccagggcttcaaacgcctggtggaggaaggcgcggaagtgaaagccggtcaaccgattctggaactggatctggattacctgaacgccaatgcgcgttcgatgataagcccggtggtagtcagcaattctgacgactatgccggcctggcggcgctggccagcggctcggtggtcgccggtcagaccaagctgtacgagatccagaaataaggctgtttttacctgagtagtacccggggccggtcacgcatcatggcggagtttgccccgacttggcgggaagagagcgatctcttcccgctttttttatcccatttcgctccacggcggtgcgctgcgcgccgatggtgcaatatgccgcatttttcgtgaaacaaacggttgtttccagacgtggcttgttggatcataggcggttatgtgtagcgctttgcattgaggaacagtgaaatgagtgaggctgaagcccgcccaaccaattttatccgtcagatcgtcgatgaagatctggcgtcggggaaacacacgtcggtacatacccgtttcccgccggagcctaacggttatctgcatatcggccacgccaagtccatctgcctgaacttcggcatcgccaaggactatcagggccagtgcaacctgcgtttcgatgacaccaacccggtgaaagaagacatcgagttcgtggagtcaatcaagcacgacgtggagtggctgggctttgagtggagcggcaacgttcattactcctcagactatttcgatcagctgcaccagtatgcggttgagctgattaccaaggggctggcctacgtcgatgagctgtcgccggagcagatccgtgaatatcgcggcaccctgacctcgccgggcaaagacagcccgtaccgcgaccgcagcgtggaagagaacctggcgctgttcgagaagatgcgcaacggcgagttcgccgaaggcgccgcctgcctgcgcgccaagatcgatatggcttcgccgtttatcgtgatgcgcgatccggtgctgtaccgcatcaagtttgccgaacaccaccagaccggcaacaaatggtgcatctacccgatgtatgatttcacccactgcatttccgatgcgctggaagggatcacccattcgctgtgcaccctggagttccaggataaccgccgtctgtatgactgggtgctggataacatcaccattccttgccacccgcggcagtacgaattttcgcgtctgaacctcgaatacgccatcatgtcgaagcgcaagctgcaccaactggtggccgagaagatcgtcgaaggttgggatgacccgcgcatgccgaccgtctccggtctgcgccgccgcggttataccgccgcctcgattcgcgagttctgcctgcgcatcggcgtgaccaagcaagacaacaacgtcgagatggtggcgctggaatcctgcattcgcgacgatctgaacgagaacgccccgcgcgccatggcggtgctggatccggtgaaaatcgtcatcgagaacatgggcgacgcggtggaaatggtcaccatgcctaaccacccgaacaagccggaaatgggcagccgcgatgtgccgttcagccgcgagatctatatcgatcgcgccgacttccgcgaagaagccaacaagcagtacaagcgtctggtgctgggtaaggaagtgcgtctgcgcaatgcgtacgtgatcaaggccgagcgcgtcgagaaggacgaagcgggcgagatcaccaccatcttctgcagctacgatgcggaaacgctgagcaaagatcctgccgacggccgcaaggtgaagggcgtgatccactgggtgtccgcggcgcacgcgctgccggcggaaattcgcctgtacgatcgcctgttcagcgtgcctaacccgggcgcggcggaggatttcctctccaccatcaacccggaatcgctggtcatcaagcacggtttcgtcgagccgagtctggcggccgcccagccggagaaggcctaccagttcgagcgtgaaggctacttctgtgccgacaatcgttactcgtcggccgagcatctggtgtttaaccgcaccgttggtctgcgtgacacctgggcgaaaatcgaaggctaatcttattcgccttggaaattaatgaatcagcgcggcttaggccgcgctttttttatgtctgccatcgagcaaatcatctattcctgcagcgttattccgggctgtgcttaattaaccgcggtgcgttaatcaataagttttttgatattggacttaatagtcttaatttttacttatatattcgtgatgcgaattaatttcatttggagagcgctctcaatttttattgtctgaatgacggatttggtcaggctgaaaccattaatcgtctcttgttgacctcgtatctcaatttattctgatttaattgaattttttattcgacaccttccatgaacaccggcgtaacaaaatctcactgatatgtgctccttgtcatattttgacaaatctcccgcatttttcatttgataattcgcgtcgcgaaaaatagtctgtctgtagcaattagtgctgtgggaataacatctcgtcggcaattttttttacccgttcgggttttttattggcagtcgtgcagggcagtggtgaacacaggcggctgcaacttttaagttaagtcaaagaggaatttcaatatgggtacgcacggtgctcagcgtaaaacgctggcgctcgcagtcgcgggcgcgctgttgggaacagggtttgccatggcgcctgaggcgaaagccgcagggtttatcgatgattccacgctgaccggcggcatctattactggcaacgtgagcgcgaccgtaaagatctcaatccggacagcaaggattacaaccaatacaccaccaacctgtcgcactctaccgccaacctgagcctggatttcgcttcgggttatgcctgggacatgttcggtctggacgtcggtgcctttaccgccatcgagctggcggaatccagcgccagcggccacccgaacgagatcgcgttctcctcaaaaaaccgtacctacgacgaagactattccggtgacaaaggcggcgtcagcctgtacaaagccgccgccaagttcaaatatggcccggtctgggcacgcgccggctatattcagccgagcggccaaaccctgctggcgccgcactggagctttatgccgggcacctatcagggcgccgaggccggcgccaagttcgactacggcgatgccggcgcgttgagcttctcctacatgtgggccgacaaatacaaggcgccatggcatatcgaggtggacgacttccgccagaacgataagaaaacccgcgtctcctacctgcactcgctgggcgccaagtacgatttcaaaaacgatctggtgctggaagccgccttcggccaggcccagggttacgtgaatcagtacttcaccaaggcgtcttacaaattcgatgtgttgggcaacgcgctgaccaccagttaccagttctacggtgcggaagatcgcatcagcgacaagaacgatccgaacagcatctacgacgggctggcctggctgcaggcgctgaccttcggttacaccaccggccagttcaactggcgtctggaaggcaccatggtcaaggcggaaggcaaccagggcttcttcctgcagcgcatgaccccgacctacgcctcgtccaacggccgcctggacgtgtggtgggataaccgctccgactttaacgccaacggcgagaaagcggtgtacgccggcgtgatgtatgacctcagcaactggaacctgccgggcatggcggtcggcggctcctacgtttacgcctgggacgccaagccgagcaccaacccgatctacgatcagagccagcgcctgaaagagagcgcctggagcctggacgcgatgtacaccatccaggaagggcgcgccaagggcacgctgatcaagctgcactacacccagtatgacaaccacaccaacatcccgagctggggcggcggttacggcaacatcttccaggacgagaaagacgtcaagttcatggtcatcgcgccattcaccatcttctgatgcgttccccggcctcgtcgccgggggcagttaagggaattcaacgatgaaaaaaatcatgctgatgttggcggccgccgcggccttgagcgcctgcgcgcaacccgccgcgccgccggaagacgccaaattgaagcaggcttacagcgcctgcatcaacaccgccgaaggttcgccggagcgtctgcagccctgcaaggcggtgttgaacgtgctgaaacaagagaaacagcaccagcagttcgccgcgcaggaaacggtgcgggtgatggattatcagaactgcattatggcggtgcacagcggtaacggtcaggcttacgacgccaagtgcggcaagctgtggcaagaaattcgcgataacaataattaagaaggacgagaagatgaacgcattcaaactgagcgcactggccgccttgacggcaacgatgggattcctgggcggcatgggtaatgccatggccgatcaacagctggtggatcagctgagccagctgaagctgaacgtgaaaatgctggataaccgcgccggcgaaaacggcgtggattgcgcggcgctgggcgccgactgggcctcatgcaaccgggtgttgttcaccctcagcaacgacgggcaggcgatcgacggcaaagactgggtcatctatttccacagcccgcgccagaccctgcgggtggataacgatcagttcaagatcgcgcatctgaccggcgatctgtacaagctggagccgaccgccaaattcagcggtttcccggccggtaaggcggtggaaatcccggtggtcgccgaatactggcagctgttcagaaacgacttcctgccgcgctggtatgccacctccggcgacgccaagccgaaaatgctggcgaataccgacaccgaaaacctggaccagttcgtagcgccgttcaccggcgatcagtggaagcgcaccaaggacgacaaaaacattctgatgacgccggcttcgcgctttgtcagcaatgccgatctgcagacgttgcccgccggcgcgctgcgcggccagatcgtgccgacaccgatgcaggtgaagatccacgcacaggacgccgacctgcgcaaaggggtatcgccggatctgagcacgctggtcaagccggcggcggacgtcgtcaaccagcgtttcgcgctgctgggcgtgccggttcaggccaacggttacccgatcaagaccgacatccagccggacaagtttaaaggcgcgatggcggtgtcgggtgcctatgagctgaaaatcggtaagaaagaggcgcgggtgatcggcttcgatcaggccggggtgttctacgggttgcagtcgatcctgtcgttagtgccgagcgacggcagcggcaagatcgccacgctggacgccagcgatgcgccgcgcttccagtatcgcggcattttccttgacgtggcgcgcaacttccataagaaggacgcggtgttgcgtctgctggatcagatggcggcttacaagctcaataaattccacttccacctgagcgatgacgaaggctggcgcatcgagatccccggtttgccggagctgacggaggtcggcggccagcgctgccacgatctgagcgaaaccacctgcttgctgccgcagtacggccaggggccggacgtctacggcggcttcttcagccgtcaggactatatcgacatcatcaaatacgcccaggcgcgccagattgaggtgatcccggagatcgacatgccggcgcacgcccgcgcggcggtggtctctatggaagcgcgctacaagaaactgcatgccgccggcaaagagcaggaggccaacgagttccgcctggtggatccgaccgatacctccaataccacctcggtgcagttctttaaccgccagagctacctgaacccgtgcctggattcctcccagcgctttgtcgacaaggtgattggcgagattgcccagatgcataaagaagccgggcagccgatcaaaacctggcacttcggcggcgatgaggcgaaaaacatccgcctgggcgccggctataccgacaaggcgaaaccggagccgggtaaaggcatcatcgaccagagcaacgaagacaagccgtgggccaagtcgcaggtttgccagacgatgatcaaagaaggcaaggtggccgacatggaacacctgccgagctacttcggccaggaggtcagcaagctggtgaaggcgcacggcatcgacagaatgcaggcctggcaagacggcttgaaagacgccgagaacgcaaaggcgttcgccacctcgcgcgtgggcgtcaacttctgggatacgttgtattggggcggtttcgatagcgtcaacgactgggccaacaaagggtatgaagtggtggtctccaacccggactacgtctacatggacttcccttacgaggtgaacccggacgagcgtggttactactggggcacccgcttcagcgacgagcgcaaggtgttcagcttcgcgccggacaacatgccgcagaacgcggaaacctcggtcgaccgcgacggcaaccactttaacgccaaaagcgacaagccgtggccgggcgcctacggtctgtccgctcagctgtggagcgaaacccagcgcaccgatccgcagatggaatacatgatcttcccgcgcgcgctgtcggtggcggaacgcgcctggcaccgagccggttgggagcaggactatcgcgccggccgtgaatacaaaggcggggaaacccactttgtcgacaccaaggcgctggagaaagactggttgcgcttcgccaatatcctgggccaacgagaactggccaagctggacaaaggcggcgtcgcttaccgtctgccggtgccgggcgcgcgcgtggcgggcggcaagctggaagcgaatatcgcgctgccgggattgggcatcgagtactccaccgacggcggcaagcagtggcagcgttatgacgccaaggccaagccggcggtatcgggtgaggtgcaggtgcgttcggtcagtccggacggtaaacgttacagccgcgccgagaaggtctaagcccggcacatcggcctgtcgtcatggcggcgggccgcttaacgaagcgggaatgcgttcgcccccgcgcgtgccggcgtggggcggatgttgaagtgagagcagtacgtggagtcgcagtgccgctgcaattgtagtatttcatgacatgatctttccccggcttgcccggggatttttttgcccgttgtacggcgggcataaaaaaaccgcctcaatgtgaggcggtttctcatagccggtcaggcttatttcttgtcgtgcagcgattcgtcttcgcggcagtcaccggtttcacagtggccgtacaggtacagactgtggttggtaagcttgatgccgtgctgcttggcgatatcacgctggcgcacttcgatggattcgtcgctgaattcgatcactttgccgcagtccaggcaaatcaggtgatcgtggtgatgctgttgggtcagctcgaacacggacttgccgccttcgaagttgtgacgtgtcacaatgcccgcatcgtcaaactggttcagtacgcgataaaccgttgccaggccgatctcttcgcccatatcaatcagttttttgtacaaatcttccgcactgacgtgatggcattccggattttgcagtacttccaggattttgagtcgcggaagcgtgacttttaagccggccttcttcaatgcgatgttgttgtcggtcatgcgaattcagtcctgttactatgctaatcaagttgaggcgtactcgcctgtggcatcggtcggcacaaagagttaatgcgtctcattatagaaccggttgtactaaatggaaaccgccggttgttaacaaagatataattgcactattgcatgttttgcatgcaacgccttgatggatgggataaaccgatatctcagtctaccgtgacggggtgggaagttacaaatctgtagcttctatcgcagcaatccctgttgccgatgacggccctgtcggcacactatgcactttacagggcctttgttcaacctttcgccagtcccggcgtttagccgacgatatcggccaggctcagctcttcgacaatctgtttgacccaggcgtcgacgcgctcattggtcagctccggctgacggtcttcgtcgatcgccagaccgatgaagtggttgtcgtccgccaggcctttggaagcttcgaagtggtagcctttggtcggccagtggcccacgatggccgcgccgcgcggttcgatgatgtcgcggatggtgcccatcgcgtcacagaagtattccgcgtagtcttcctggtcgccgcagccgaacagcgccaccagtttgccgttgaaatcgacttcttccagcgtcgggaagaaatcgtcccagtcacactgcgcttcaccgtagtaccaggtcgggatacccagcagcaggatatcgaacccttccaggtcttctttgctgcttttggcgatgtcgtgcacttcagagacgtcgtcgccaaactgtttctggagaattttctggatcattttggcaatgttttcggtattgccagtgtcgctgccaaagaaaatgcctacagtagccatatcgcgtataacctttaaattcaattaattgcattactcggcgccggcactgccgccgattaaaatgatgccatggcaagagcctttcgccacggtggcgggcgccgacaggcgcagtctcttaccggtaaatgcgtatcatgccagaaagtggcgccggggttttatcgcatttatgcgatgccgaaggatgaagaaaagcgtggtcgatccggcgttgtccttaacgccgcgccgcgcgtgcggccgaagagatcaatgttccggctgttcttccgccagttgcgccaacagcatctgctcgatgagttcgctgcggctgatgttgcgctgttccgccagtttgttcagggcgtccaccgcatccgcgttgattttcagctctacgcgccgcaatccgcgcactttatcgcgccgtaactgattgcgcttattgattctaagctgttcatcgcgggaaagcgggttggttttcgggcgccccggacggcgttcatctgcgaacagatccagcgtcgtgcgatccgtttgttcttttgccataggtagcggtactgcaagggagtttgcatcaaaaagcgctcgcacgcttccggaggcatcggttaacacacttcgggccaataaaccctaacccaaatttacccccgaaccggcgttcgcgaacgcgctggcgcggcggcaaaattatagcgcgccatattaccccagcagatggagcggcgacaatgcctaactgcgggctaaacgcgctaagccgttatctttagcgcgttttttcgccaggtgagcgcgtttttcaggcttcgccgaggaaacggtggatggcgcgcagcaccgcttccggtttttcggcgtgcacccaatggccggtgccggcgacgacgtgcgcgcgtgcctgcgggaattggcgggcgatgtctgcacggtagctgtcctgcacgtacggcgacaggccgccgcgaatgaacagggtcgggtgtggccaggccgggacttcctgccagccggtgatgtcttcgtagcgttcgatcagcaccggcaggttgaagcgccattcaccgttatggaaggacttcagcaggaactggatcacgccttcttcctgcaggtagtcgcgcatcaactgggcggccgcctggcgctgggtaatgccggcggcgctgacggccttcagcgcggcgaagatctcgtcatggcgtcgggtctggtaatccaccggcgcgacgtcgatgacgatcagcttggcgatgcgctcgggcgcgatggcggtcagcgccatcgccgctttgccgcccatcgagtggccgatgacgatcgctttctccagctgcagttcgtcgagcagcgccagcagatcttgcgccatggcggggtagttcatgtcgtcggcgcgcggggagaggccgtggttgcgcagatcgaccttgatcacactgtgctgtttatgcagatcgcgcgccagcacgcccaggttgtcgagattgccgaacagcccgtggatcagcagcaccggcagcgcgtctgactcggcggccagcagttgataatgtaatttcatggcgaagttcatacagagagagattcagattagggtatcatgattgaatcgcacgatgaatcatgcggaattttcgcggcgcgggcttggcagtgccggctataggtattagtctgcatttgccgtccggaggcacattgttgtgttcgccccagcgcttttaaccttataatcccatggcttgaatgcaggatctggcttcaggttctaagtagaaaaaacagtattggataaagatgaaaactattgaagtcgacgaagagctttaccgttatattgccagccacacgcaacacatcggtgaaagcgcgtccgatattttacgccgcatgttgaaattcaccgccgggcagccggcgcgcgcgttgcctgccgccagtgcgtcgcagtccgtcgagctggaaaaagcggcgccggttcagcgcccgcgcgatcgcgtacgcgccgtgcgtgaactgctgctgtcggatgaatacgccgagcagaacaaagcggtcaaccgtttcatgctggtgctgtccacgctgtacaccctcgatgccgccggttttgccgccgccaccgaggcgttgaccggccgtacccgcacctatttcgccggcgatcagcagaccctgctggccaacggcacgcataccaagccgaagcatgtgcctggcaccccttactgggtgatcaccaataccaataccggccgcaagcgcagcatgatcgaacacatcatgcaggcgatgcagttcccggcggaactgatcgagaaagtttgcggtaccgtctaatttagcgaacagcccgtcatgatggccgtgcgcgacgtatttgcccggtcaccgacagggatgagggagatatgtcgatggcgaataatccacgtgccgggcagcccgcccgccaaagcgatctgatcaacgtagcccagctgacgtcgcagtactatgtgctgcaaccggaagccggcaatgccgcacatgcggtgaagtttggcacctccggccaccgcggcagcgcgcagcgccacagcttcaacgaagcgcacatcctcgccatcgctcaggcgatcgccgaagttcgtcatcagcagggcaccaccggcccgtgctacgtgggtaaagacacccatgcgctgtccgaaccggcctttatttccgtgctggaagtgctgaccgccaacggcgtcgatgtgatcgtgcaggaaaacaacggcttcacgccaacgccggcggtatcgcacgccattctgtgccacaaccgccgcggcggcgcgcaggccgacggcatcgtcattacgccgtcccacaacccgccggaagacggcggcatcaagtacaacccgccgaacggcggtccggctgacaccaacctgacgtcggtgatcgaaaagcgcgccaacgaactgctggcgcagcagctgaaaggcgttcagcgccagtcgctggacaaagcctggaacagcggccacctgcacgccaaagatctggtgcagccttatgtcgaaggcctggttgacgtggtcgacatgccggccattcaacgcgccggcctgaaactgggcgtggatccgctcggcggctccggcatcgcctattggcagcgcgtggcggaacactacaagctggatctgacgctggtgaacgactccatcgatcagaccttccgctttatgcacctggatcacgacggtatcatccgcatggactgctcgtccgagtcggcgatggccggcctgctggcactgcgcgacaaattcgatctggcgttcgccaacgatccggattacgaccgtcacggcatcgtcacgccgaagggcctgatgaacccgaaccactatctggcggtagccatcaactacctgttccggcatcgcccgcagtggggcgccgatgtggcggtaggtaaaacgctggtgtccagcgcgatgatcgatcgcgtggtggctgacctgggccgcaagctggtggaagtgccggttggtttcaaatggttcgtggacggcctgttcgacggcagcctgggcttcggcggcgaagagagtgccggggcctcgttcctgcgcttcaacggccagccttggtcgaccgacaaagacggcatcatcatgtgcctgctggcggctgaaatcaccgcggtaaccggtgaaaatccgcagcatcactatgacgatctggccaagcgcttcggtgcgccaagctacaaccgcatccaggcgccggcaacccatgcgcagaaagcggcgctgtccaagctgtcgccggagatggtcaaggccagtacgctgggcggggacccgatcaccgcgcgtctgaccgcagcgccgggcaacggcgcgtcgatcggcggcctgaaagtgatgaccgacaacggttggttcgcggcccgtccttccggtaccgaagaggcatacaagatctactgcgagagcttcctcggggcggaacaccgcgagaaaatcgagcacgaagcggttgagatcgtcagcgaagtgctggcttccgccaaataatcgttgttctcgtctgataaaaagcgctgtttttacagcgctttttttatgcccgtaatttagatatatctttttcacggcacgcgcttgcgcatttagatatatcgatctagattagcgttatcgacgctgtttagatatatctaaacaacctcgtattgatgttcactgttaaagcgaggtatcaccctatgtttcatcgattaggtttacaccggcatcatcaccatcatgaatgtgaagaggggcgccgtcatcgcggtggacgccatcacttcggcggcgacggcgaagagcatggccgtggcgggcgcggcggccgcggcgggcgtcatcgtctgttcgaacacggcgatctgcgtctggtgttgctggcgctggtggcgcgcaagcccagccacgggtacgagttgatcaaagcaatagaagaagcttcttccggcctgtatgtgccgagcccgggggtgatttaccccacgctgacgctgctggaagagcaggattttctcgaaccgctcaccaccggcaacggccgcaaaagctaccgcatcacctcggcgggcgagggcgagctgcaaaagcatcaacaggtggttgaggtcattctggcgcgtctggcgggcgccggccgcgagcatcatcggcacggcaacctggcggaaggcatttacgacgccatgaaccgtctgcgcagtctgctgcgcggcaacgtgatgcgcgccgatcttacgccgcagcaggtggagcgcatcaacgccgcactgttgaccgccgtggcggcgatcgaaagcgaaatgcacattcaacccacgcagcaggaggagaactgatgcccggccaccgttttaacattaccgttgaagccctgagcgaccgccagggcaaccccgtcgagaaggcaccgctgagttttgaggtgaccaaccatgacgatattctcgagatcgtcgagcgcattcgggcgcgtgacgatctgaacttcggccctgagcagagcgcggccttcgccgtggggttgaaactgttctccgaagtgatgatcgaaaaccgcaaacacccggtgttcgctccgctgcgcgaggcgttcaaggaatttatggtcggattgaagaagggcccggtggcgtaacggcgcggcaaaccgcgcccgtcggggttaaggcatgaaacggtagccgacgccggtttcggtcagcaggtgtttgggccgggccggatcggcttccagcttctgccgcaaatggcccatgtagatgcgtaggtagtggctgtgttccacgtagttcggcccccagacgtggctcaacagctggcgttgggtgatcaccttgccggcgttggccagcagctccgccaacaggcgaaactcgatcggcgtcagatgcagatcttcgtcattgcgcagcacccggcgattcaccagatcgacggtgatcgccgaaaagctcaccagcgggctttcctgttggttagctgagtggcggcgcagcgcgacccgcacccgcgccagcagctcaccgatgccgaacggcttgctgaggtagtcgtcggcgccggcgtccagcgcggcgattttgtcctcttcggcgttgcgcgccgacagcacgatcaccggaatggcgctccactgccgcagatcgcggatgtagctcagcccgtcaccatccggcaagcccaaatcaaggatgatcagatccggtttgcgcgtgccggcctcaatcagcccacgttgcagggtttcactttcaaacacccgcaggccttcgctctccagcgcggtgcgcacgaagcggcggatctctttttcatcttcaacaatcagaatgttggttggcgttatgctcacgtttcccctgcgttgattacagatcgaaggcatcgccgtcgatctcgggcggtttttccagcggcagcacgaagcggaagctggcgccgccgttggcgccgttttccgcccagatgcggccatcatgcacttcaataatggcacggcaaatggctaaccccaagccgacgccggggatcgccgactctttattgccgcgtgaaaacttgtcgaaaatcagctgcagctgatcggcggggatgccggggccgttatcccagacctcgacttccagccactcgggcagcgtgcgggcgcgaatgccgatggtggcctcggcgccggcgtatttattggcgttttccaacaggttggtgaacacccgttccagcaggctgccgtcgcagttgaccaggatctgttccggcggcagttcgaccacgatcggatgctggctgagcagcggctccagcatgtgcagcgaggcgccgacgatctcttccagcgactgccactctttacgcaggctgaaaccgccggactggatgcgcgccatatccagcaggttgttcaccagccgggtggtgctcagcacctgctggcggatctggctggcctgggtggcgtgattggagccttcggccgccaggtccagcgtgagaatttccgcctggccgaacagcacggtcagcggggtgcgcagatcgtgcgacagcgccgccagcagcgagttgcgcagctgttcgcgttcggcgtccagcttggcttcttcggcgctgcgcgccaggtgcagccgttccagcgcgctggcgatcagcactgcgaaggtttgcagcagccgctgttgttccggcaccatcagctggcgcaggttgttgggctcgatcgccaacaggccgaaggtctgtttgggggtattgagcggcagcagctggtaaggcacgccgggcagggtgtcggtgccggcgccggccggcaagcctttatcgaaactccagcgcgcgatggcttcgtctaccgacagcagaccgccttcctcgccgatcatttgctgcagccggccgtcttcctgcggcagcagcagcacggttttcgcctggaagctgctggagaggaaatgacggctggtgttggcgatgtcggccacggtcagcgcgcggctcagcccgcgtgacatttcgtacagatggcgcgcccgctgctcgcggtagcgcgccacccgggcctgataacgcaccccggcggtcaggttgccgatgatgatgccgacggcgagcatcacgccgaaggtcagcagatactgcatatcgctgacggcgaacgaccattcgggctggacgaagaacagatcgaaactggcgacgttgatcaccgccgccagcaccgatggccagcggccgaagaacagcgcgacgatcgccacgccgagcaggtagaccatcaccaggttggcctgatcgaagcccggcagcagccactgcgagagcagggtgatcagtgcgcacagcgccaccgccaccgcacagccgcgcagctgcatgcgccatttctcattgaagctgcggccgtcgtgctccttgcccggcggcggcggtgcggcgtcgctgtccagcgcgacgatcaccagatcgagatccgggcccagtctgccgaggcgatcggcgaagctgccgcgcagcttccagcgctgctcgctgcggcggccgatgatgattttgccgaggttatgttcgcgggcgtagcgcagcaccgcgcgctcttcggacggatcggccagggtggcggtttcggcgcccagctcctgcgccagccgcagcgcacgcagaatggcgcggcgttggttttccggcagccggtgcagcttgggggtttccacatagactgcatgccagtggcagccgagccgcgccgccaggcgggcggcgatgcgcaccagcttttcgttgccgctgttgtggccgacgcacagcagaatgctgtcgcgggtgtgccacactttctcgcgcccctgggtgtcgcgaaactcgcgcatctggtcatcgacccgatcggcggtgcggcgcagcgctaactcgcgcagggcgatcaggttgcctttacggaaaaaatgctcgatggcgcgctcggcctggccgggaatatacactttgccttcgtgcagccgccggcgcagatcgtccggcggcagatcgaccagcaccacttcgctggcctcgtcaaacacgtggtcgggcaccgtttcgcgcacccgcacgccggtcacgccgcccaccacgtcgttcagactttccaaatgctgcacgttgacggtagtcagcacgtcgatgccggcgtccagcagctcttccacatcctgccagcgtttggggtggcgcgaaccgtgagcgttgctgtgcgccagttcatccatcaggatcagcgccggatggcgcgccagcgcggcgtcgagatcgaattcatgcaccagccggccgcgatgctggatgcgcttttgcggcaacagcgccaggccgtcgagcagggcggcggtctcgctgcggccgtgggtttccaccacgccgaccagcacgtccagcccctgagcgcgcaaacgctgggcctcctgcagcatggcataggttttgcccacgccggcgcaggcgccgaagaataccttcaaccggccgcgcggtttttcattggccagcgccagcaggctatcgggatcgggacgctgctgttcttcttcgaccatgacaattccttgtgttaccaagcaaaaaggggttcggcatgccgaaccctatcactatgctgaatacggcgcgctacttcaacgcatccagcgccaggttcagcttcagcacgttgaccaccgattcccccatgaagttgggcgtggcccgatcggtgttgtcttcgatcagtttggcgacctgttccggcggcagatgacgcgccgccgcgacccgcgccagctgataccgcgccgcggcgatcgaaatctgcggatccagcccgctgccggaggcggtcagcagatccaccgggatcgggccgctcatggccggattggcctggcgcagctgcgccgcgcgttcggcgatagccttatccagcgccgggttggtggccgccaggttgctgccggcggaggcctgtggattataagccgaatcgccggtcgccgacgggcggccccagaaatagtcggcgcgcgtgaagttctggccgatcagcgcagagccgaccgccttgtcgccctggtacagcagcgaaccgttggccgcgcccgaaaacagcagctgcgccagcccggtggtcagcagcggataggcgatgccggtgatcagagtcagcaggatcaacatcaccagcgcaggtcgtaaatacgtcatgttcatttccctcaatggttaaccggcgacgtgcagcgcgaccaggatcaggtcgatcagtttgatgccgatgaacggcaccagcagaccgccgaccccatacagccacaggttgcggcgcagcagagccgcggcgctcatcggtttgtagctcacccctttcagcgccagcgggatcagaaacacgatcaccagggcgttgaagatcaccgccgacatgatggcggaggcgggggagtgcaggtgcatcacgttcagcgcgttcagctgcggataggtggccgcgaacgccgccggaatgatggcgaagtacttggccacgtcgttggcgatgctgaaggtggtcagcgagccacgcgtcatcagcatctgtttgccgatatgcaccacttcgatcagcttggtcgggttggaatccagatcgaccatgttgcccgcctctttggcggcctgggtgccggagttcatcgccaccgccacatcggcctgcgccagcgccggggcgtcgttggtgccgtcgccggtcatcgctaccagacggccttccgcctgatactggcggatcagcgccagcttggcttccggcgtggcttccgacaggaagtcgtccaccccggcttcggcggcgatcgccgccgcagtcagcgggttatcgccggtgatcatcaccgttttgatgcccatcttgcgcagctcattgaagcgttccttaatgccgcccttgacgatatccttcagcgctaccacgcccagtacccgggcgccttccgccaccaccagcggtgtaccgccggtgcgcgccacgctttccaccagatcgtccaccgcccgcgggaagtgcccctgattggattcgacgtgacggcgaatggcatccactgcgcctttgcggatcatgcgctcctgcacgttgacgccgctcatgcgggtctgggcggagaagggcacgaaggtggcgttcagcgcctgcagatcgcgctcgcgcaggttgaatcgttgtttggccaacaccacgatgctgcggccttccggcgtttcgtccgccagcgaggccagctgcgcggcatccgccagctcttgctctttcacgcccggcgccggcaggaactccgaagcctggcggttgcccagcgtgatggtgccggttttatccagcagcagcacgtccacgtcgccggcggcttccaccgcgcggccgctggtggcgatcacgttggcgccgagcatgcggctcatcccggccacgccgatggcggacagcaggccaccgatggtggtggggatcaggcaaaccagcagcgcgaccagcacggtgatggtgaccacgctgccgctgccggccgcctcgacgctgtattgcgagaacgggaacagggtggcggtggccaacacgaacacgatggtcagcgccaccagcaggatggtcagcgcgatctcgttcggcgttttgcggcgcttggcgccttccaccatggcgatcatgcgatcgaggaaggtttcccccgggttgacgctgcactgcaccaccagccagtcggacagcacgcgggtgccgccggtgaccgaggagaagtcgccgccggactcgcggatcaccggcgcggattcgccggtgatggcgctttcatccaccgaagcgccgccctccagcacttcgccgtcgcacgggatggtatcgccggcttccaccagcacgatatcgcctttgcgcaggctctcggcggccactttctccgtggcgccgtcgcggcgcgggccggccagttttttcgcccagctggttttcttggtgcccttcaggctttccgcctgggccttgctgcggccttcggccagcgcctcggcgaagttggcgaacagcacggtgaaccacagccacagggagacgctgccggtaaaggcggcggcgccgtcggtttggccggtgagcatcgccagccagatagcggtggtcagcaggctgccgatatacaccacgaacatcaccgggttgcgccattgaacgcgaggatccatttttttcaccgcatcgatcagcgcggtgcgcaccagagccggttcaaacagcgcgcgttgtttgcgagtcatctcttattctctctctgtgacgtcggttagtttgccagccaaagctgcaaatgctcggccaccgggcccagcgccagcgccggcacgaaggtcagcgcgcccaccagcagcacggtgccgatcagcaggccgataaacagcggcccataggttggcagggtgccgttgcccgccggctggcgtggcttggcgctcagcgaaccggcgatcgccagcaccggcaggatcactccgaagcggccgacgaacatggcgaaggccagcagcaggttgtagaacggcgtattgacgctcaacccggcgaaggcgctgccgttgttgttggcggcggaggacagggcatacagcacttcgctgaagccgtgggcgcccggattgaggatgccggcgcggcccgcgtcggtgccgatcgccagcgcgctgcccagcaacaccagcgtcggcgtgaccaggatcgccagcgcggtcatcttcatgtcgtaaacgtcgatcttcttgcccagatattccggggtgcggccgatcatcagaccggcgataaacaccgtcagcagtacgaacagcagcatgccgtacaggccggagccgacgccgccgaacaccacttcaccgatctgcatcagccacatcggcaccatgccgcccagcgcggtgaaggagtcgtgcatggcgttgaccgccccgcaggacgcggcggtggtcaccaccgagaacaggctggtggcgagaatgccgaagcgcgactctttgccttccatattgatgttgctgtcggcgcccagcgcgctcaggtgcgggttgcccgccagctcggcaaccatcaccaccaccaccgccaccacgaagatcagcgccatcgcccagatcagcgcgtggccctgacggttttctccggccagctggccgaaggagaagcacagcgcgcaggggatcaggaagatggccagcatctgcacgaagttggtcagcacggtcgggttttcgaacgggtgcgccgagttggcgccgaagaaccccccgccgttggtgccgagcatcttgatcgcttcctgcgaagcgaccggccccatcggcagcgtctgctgcgcgccttcgagcgtggtgacgtgcaggtaaggcaggaagttttgcagcgtgccctggctgacgaagaacagggcgatcagcagcgcgatcggcagcagcacatacagcgtgatgcggaacagatcgacccaggcgttgccgacggtcttgccggcgcggcgggtaaaggcgcggatcagcgcaaaggccacggcgatgccggtggaggcggaaacgaagttctgcaccgccagcccggccatctggctgaaatagctgagggcgctttcaccgctgtaggcttgccagttggtgttggtgacgaagctgacggcggtgttgagcgccagatcccaggagaggccagggaagccttgcgggttgagcggcagcgagccctgcgccatcagcagggcgaacagcagcgccaggccgagcaggttaaacgccaggatcgccagcgcgtactgccaccagttcatctcggtggggcggatgccgcaggcgcgccagacgccggcttccactgcgcgcagcgcaggcagcggctcaccttcgatcaggcgcgccataaaaccgcccagcggccgggccagcagcagaagcaccaacaggaaactggcgatcagtaaaaaggctgaagccgccatcagaaatcctccgcgttaaacagggcgtagaccagataggccaacagcagcagaaccaacagcgcaccaccaataacgctgaaactcacgggacacctccagaggtgttgtttttgatagaggcagtgtagggagcggggtagaaagaagatgaaaaaatcgcgcgggcgggtgtaaaaaaagtataaaaatggctgaaatttcagcggaaattggccgtttcaggcaacctgcttgcggcgagattgcgcctgatgtgtgaataagccggggctggggcgtgggatgaagaaccgaataataaccacaatgtaacccatgtttagttaaaaattaacttgattgtaacaaaattacgaatcgctgcggtgattagcgattttttgtgcgatttagtggtcggatgagtagtaaactttcatcaagtgcgctaaaattttgtccagttaccaaattaccgattgttcatttgatacgccgacgccgttttccctgacaaatcaacggcaggcgtttttaaggaggttcgcatgtctacgacctatcacgcttattcactgcatcggattctcctgcgccgcagcgcagtggttatcgcgggcattttggccctgccggtgatgctgttccgcagcgatcgcgggcgtttttacagctacctgcaccgcgtctggtcaaaaaccagcgataagccggtctggctgcagcaggcggaactggcgtcctgcgatttctactgagtcgctgccgattcacgaacaaccctcgccctgcggcgggggtttttttatgccccaagcccgctgccgtcaagcgcaaggtcgtatttggcaagccattcttctacactttccccatcgaccaacaccacgagagaacggtatgagtgacaagatccctatcggcatcagcgcctgtttactgggcgacgcggtgcgtttcgacggtggccacaagcggctggccttcgcggtggaacagttggcgccctatgtgcgctttgagcccgtatgcccggaaatggcgatcggcctgcccacgccgcgcccggcgctgcgcctggtgaaacaggcgcagccctggccggcgatgcgctacagcaacgacgccggcgtggatctgaccgaggagatgcgcagtttctccgcgcagcgcgtggccgcgttgcagcacctgtgcggttatatcgtctgcgccaagtcgccgagctgcggcctggagcgggtgcgggtctacagtgagaacggcaaggactcgcgtaaaaacggcgtcgggctgtttaccgccgaactgctgcgtcagatgccgtggctgccggtggaagaagacggacgattgcaggatgcggcattgcgggaaaacttcattgaacgggtgtacgcgctgtatgagttgaatatgctgtggcgccaggggctgacccgcggcgggctgatcgcgtttcacagccgctacaagctgtcgctgctggcgcattcgcagccggcgtaccgcgaactggggcgtttcgtcgccgacattcatcgctgggactcgctggaggccttcgccgtggaatatcgcagccgcctgatggcgctgttggcgcacaaggcgacgcgccgcaaccataccaacgtgctgatgcacgtgcaggggtacttccgccgccagctcagcgcggcgcagcgccaggagctggcgcacctgatcgaccgctaccggcagggcatgcagccgctgctggcgccgatcgccttgcttaagcattacatggcggaataccccgacagttatctggcggaacaacgctatttcgaaccttatccggaggcgctgcgtttgcgttacggccattgattgacaagggaattttatgaccacgcatctggtctggttgcgtaacgatctgcgtatcaccgacaacaaagcgttgcatgctgcctgcagcgatcccaaagcccgggtgctggcggtgtttatcgccaccccgcagcagtggcggcagcatgagatggcgccgcggcaggcggcgctgatccacgccagcctgcgggcggtacagcaggcgctggcgcaaaagggcattgcgctgcattgccatgcctgttcggactttgctgcatcgatcgactggctggcggactattgccggcgagagcaggtggacgcgctgttttacaatcgccagtacgaactgaatgaacggcgccgcgatgcgcggctggagcagcagttgaatggacgggtaacgtgccacggttttgatgacagcctgctgttgccgccgggcagcgtgctaaccggcggcggcgagatgtacaaggtttatacgccgtttcgcaacgcctttattcagcgcctgactgagtccgacgtgagctgcctgccggcgccgaagatccgtgccgatggcgcgttgctagcgcctgaagcgccggcggcgttcgattatcccgcggcggacatcgggaatgactatcccgccggcgaggaggccgcgctacagaggctgcgcgccttttgtcgtgagcaagtgcaggattaccttcgccagcgcgatctgcccgccatcgccggcaccagcagcctgtcgccttatctggcgatcggcgcgctgtcgccgcgccagtgttttaaccgcctgcgcgccgaatgcccgcagctgctggaagatcgcgagagcggcgctttcgcctggctgaacgagctgatttggcgcgagttctaccgccatctgctggtggcctatcccgagctgtgccgccatcggccgtttatcgcctggacggacaaagtgcgctggtgcgatgacgcggcgaagctgcaggcctggcagcggggcgagaccggctatccgatcgtcgatgccgccatgcgccagctgaacgctaccggctggatgcataaccggctgcgcatgatcagcgccagtttcctggtgaaggatctgctgatcgactggcgggccggggagcgctacttcatgtcgcaactgctggacggggatctggcggccaacaacggcggctggcagtgggcggcttccaccggcaccgacgccgcgccgtatttccgcatcttcaacccgaccacccagggtgaacgttttgatccacaaggcacttttatccgtaaatggttgccggaactggcggatgtgcccgacaatgacatccatcatccccacctctgggcggaaaagcagccatgcgtgctgaattacccgctgccgatcgtcgatcataagcaagcccgcctggagacgctggcggcgttcgaggcggcgaaacggggagagtcttgaggcaactgcaaggagcgacgcaatgatgaaaaaggtgctggccctgtgcctgagcggctattccgcgctggcgatcgccggctttgacgtggtggcgctgggcgtcgacggcggcgtcagcgacggcaacctgacttcctacctgatccgcagcgacaatcagccgcagtatgtggcgctggacgccggttcgctgctgccgggcatcgccaaagggctggagaagggcagcttcccgcaggtgacgcccgagctggccgcgccttatacgtcgcagggctacgtgtttcggcagttgatcggcagctactttatcagccacggccatctggaccacgtggcggggctgatcgtcggctcgccggaagacaataaaaaaaccgtttacgcccaggcggacaccgtgctgaccctgcgcaaccattactttaactggaaggcctggccgaactttaccgatgccggcaacggtgcgcggctgggcacctaccggctgcaaacggtgcggccgcagcagcggtttaccctcggactgaccgggttgaccggcgtgatgtatccgctcagccacgatcgctacccgtcgtcgatgctgctgatttccaacggcaacgagttcttcgcctatttcggcgataccgggccggataaggtggagcagtcgcgcgatctcgataccgtctggcgcgtgctggggccgcttgtcgagcagaaaaagctcaagggcatgattatcgaaacctcttaccccaacggggtggaggacaaacatctgtacggccatctgacgccggcctggctgctgaaggagctgaagaacctgacgcagtacagcggcggcgaaggctcgctgaacggtctgccggtggtcatcagccacatcaaacccagcctgaagcagggcgaagacgcgcgcgccgccattgcgcagcagctggcgcagggcaacgatctgggggtgaaattcatcctgatggcgcagggcgaccggcagacattttgactatgaagagagaagagaatgcgtaacctcgatctggaacaactgatcaacacggaactgaacgccgcggcgtttcaggactacgcccccaacggtttgcaggtagaggggcgtgcgcatgtacagcgcatcgtgaccggcgtcaccgcctgtcaggcgctgctggacgccgcggtggcgcatcaggccgacgcgattatcgtgcatcatggctatttctggaaaaacgaggcgccggcggtgcgcggcatgaagcgcaaccgcctgaaaacgctgttgacccacgacatcaacctgtacggttatcatttgccgctggacgcgcatccggtgctgggcaacaacgcgcagctggcgcaggcgctgggcattcgggtgattggtgaaatcgagccgctggtaccgcacggggaattcgaacagccgctgaccggcgaagcgctgcaacagcgcatcgaaagccggctggggcgcgcggtgctgcactgcggcgataacgcgcctgagcatattcgccgggtggcctggtgcaccggcggcggtcagggctttatcgacagcgcggcgcgcttcggcgtcgatgcgttcatcagcggtgaagtctctgagcagaccattcacagcgcgcgcgaaatgggcgtgcatttcttcgccgccggtcaccacgccaccgagcgcggcggcgtgaaggcgttgggggactggctggcccagcaccacggctttgatgtgacctttatcgatatcccgaatcccgcctgatctttttcttccccggatccagcccggcctgcgcgccggctgaatccttttatcgcgctatttccttattttccttatggttgcgttctattgacagccggggccgcgtcacgcataactggtgtgtttttcagcgcgataataaggagaataagggtgcaacaagcacgttattacctgttgggtgaaagagcggtagtgcttgaactgtcgccgccggtgacgttaccgagccagcagcgcatttgggcgctggcggaaaagctgaatcaccatcccgacgtgcgggaagtggtgccggggatgaataacctgacgctgctgctgcatacgccgcaggccgacgccgaagcgatgctggcattgctgcagcaggggtgggagagcaaagagcgcctgacgccggaatcgcgtcaggtggatattccggttatctacggcggggaacagggccccgacctggatgaggtggcgcgtcataccggcatgacgccgcaacaggtggtggaatgccacgcggcggcggcctatgtggtctatttcctcggctttcagccgggcttttcctatttgggcggcatgccggaacaactggcgacgccgcgccgcgctgaaccgcgtctggcggtggcggccggctccgtcggcatcggcggcggccagaccggcatctatccgctggtgacgcccggcggctggcagctgattggccgcacgccgctggcgctgttcaatccgcatgaaatgccgccgacgctgctgcgcccgggcgatagcgtacgctttgtgccgcagaaggagggcgtatgctgattattctgcgcgccggcatctataccacggtgcaggatttgggccgtgaaggatttcgccgtctgggcatcagtaccggcggcgcgttggatcaaccggcgctgaagatcgccaacctgctggtgggcaacgcgccggaggccgccgggctggagatcacgctcggccagttcagcgccgagtttacccgtcccggctggatcgccctgaccggcgccggctgcgacgcgcagctggacggtaagccgctgtggaccggctggcgctacccggtgaaaaaggggcagcgtctggtgctgggcacgccgaagcgcggcatgcgcagttatctcgcgatcgccggcggtatcgccgtgccggaaatgttgggctcgcgcagcaccgacatgaaagccgcttttggcgggtgcgaggggcgtaatctgaaggacggcgatcggttgccgctgggtaaatccgccgctgaaccgcaaacccgctgtggcgtgaagcagttgctgttcaccaatcgcatccgtgcgttgccggggccggagtacgccgaattcagcgaagaggcgcaagatacgttttggcgcgccgcctggcagctcagcccgcagagtaaccgcatgggctaccgtttgcacggcggcacgccgctggctcgcaccaccgacagagagatgctgtcgcacggcctgatgcccggcgtggtgcaggtgccgcacaacggccagccgatcgtgctgatggccgatgcgcaaaccaccggcggttacccgcgcatcgcctgcgtgatcgaagccgatctttaccatttggcgcagatccgtctcggcgaaccgatccatttcgtgctctgttcactggccgaggcgcagcgcgccaaggccgagcaggatcttttccttcgacagattgcctgggggttacatgatcgttgatttgaacgccgatctcggcgaaggctgcgccaacgaccaggcgctgttgcaattggtgagctcggccaacatcgcctgcggcttccacgccggcgatgcgcagaccatgcgtcagtcggtgcgctgggcattgcagtacggcgtggcgatcggcgcccacccgagttttcccgatcgggagaatttcggccgcactcgcatgcagctgccgccggaaacggtgtacgcgcaggtggtgtatcagctcggggcgctggcggccatcgcccgcgccgagggcggggtgatggtgcatgttaagccgcacggcatgctgtacaaccaggcggcggttgagccggcgctggcagaagccatcgcccgggctgtgcaggcggtcgatccggcgctgcggctggtggggctggccggcagcgagctgatccgcgccgggcaacggctcggtctgaccacccggcaggaggtgttcgccgatcgcggttatcaggccgacggcacgctggtgccgcgcggtttgccgggggcgcttatcgaggatgacgaacaggcgctggcgcaaacgctggagatggtgcgccatcaccgggtgcgcagcgtcgatggcgtttggaccgccgtacaggcggagaccgtctgcctgcatggggacggcgagcatgcgctggcgtatgcgcgcaagctgcgggacagttttgttcagcaggggatccgcgtcagcgcggagcagtaaagcaagacacaacatcacaagcaaaaaactattagaaaatatcgagggaagactatggaacaggccgtgaatctctggccactgatcggcatcgccgctatcgtggtcgggtttgtattgcgtttcaacccggtgctggtggtgatcgccgccggcatcattaccggtctggcggcgctgatgccgctggacgtcattctggaaaagctcggcgagggctttctcaatacccgcaacctgccgctgatcctgctgctgccgctggcggtgatcggcctgctggagcgccacgggttgaaagagcgggcgcaggcgtggatcgccaggatcaaaagcgccaccgccggccgtttgctgatcgtgtacctgttcgtgcgcgagatcaccgcggcgatggggctgaccagcctgggcgggcacccgcagatggtgcggccgctgctggcgccgatggcggaaggggcgacggaaaaccgctacggcgagctgccggagcgtacccgccaccgcctgcgcgccatgtcggccgccaccgacaacgtcgggctgttcttcggcgaagatatcttcgtggccttcggcgcgatcatcttcatgcacaactttatgctggagtccggcggcattcagaccgagccgctgcatatcgcgctgtggggcattccgaccgccattttcgctttcctgatccacgccttccggctgtatcggatggataaacagctgagtgccgagctggcgcagctgaatcaggcggcgctgcaggcgaagggggaagcacgatgaacttccagcaacaatatctctactggctggccggcgcggtgctgctgattgtggcggtgatgtccttccgcgatcgcgccaacccgcgccgcatcaccaccgggctgttttgggggctgtacggcctggtgttcctggtcggcgactggacttaccgcctgctgggcgacgtgctcggcgaaggcagcaacgagaaacgcatgctgcacatcatcgttggcgtggtggtggtggtgatggccctgatcgccggcttcggcggcgtgcgcctcggcagctatcatcagcgaacgccgcaggagcgcgaggccagcgccaagcgcctgggcaacaagctgtttatccccgcattggcgatcccggtggtgacggtgatcggcgtgctgctgttcaacaatattccggcgttgcaaagcgcggtgttcggcagcggtaaccatgcgacactgatcaccctgttctctatgaccgtcggctgcctgatcggcctggcgatcgcggtgaaaatgacccatgagaaggcgttgcagccgatacaggaagcgcggcgcctgctggattcgatcggctgggcgttcattctgccgcagatcctcgccacgcttggcctgctgtttaccgtcgccggcgtcggcaccgcgatctcgcatttgacccaagagtatctggcggtggataaccgcttcatcgccgtggcggtctacgctatcggtatggcggtgctgaccatggtgatgggtaacgccttcgccgcgttcccgatcgtcaccgccggcatcggcattccgatcctggtgctgcagcacggcggcaacccggcggtgatggcggcgatcggcatgttctccggctattgcggcaccctgatgacgccgatggcggcgaacttcaacattgtgccggcggcgctgctggagctgccggacaagaatgcggtgatcaaggcgcaggtgccgaccggcgtgctgctgctgttggttaacgtgttcctgctgtatttcctgatgttcctgtaggagtaaggatgcaaaaagtattgattaccggctttgagccgtttggcggcgagcggctcaacccttcctgggaagtggtgaagcagctcaatgatatggagctggtgggtacgcgcattgtggcgcgccagctgccgtgcgtgttcggcgcggcgctggaggcgctcaatgcggcgatcgacgaggtgcagccgctgatggtgctggctgtcggccaggccggcggccgcaccgacatcacgattgaacgggtggcgatcaacgtcgacgacgcacgtatccccgataatcaggggcagcagccggtggatgagccgatcgtcgccggcggcccggcggcctatttcagcaccttgccgatcaaggcgatggtcagctcgatgcgcgaggccggcattccggcctccgtttcgcagaccgccggcacctacgtgtgcaaccatgtcatgtacggcctgctgcaccggttgagcggccagcgcgaggtgaagggcgggtttattcatatcccgtacctgccggaacaggcggcggcgcaccccggcgcaccgagcatggcggcctcgacggtgctgtttgcgctggagctggccgtttccatcgcgttgcaggtggaacacgatctgaaagtggcgggcggcgcaacgcattaatcaagagaatccccggcgcatcgggctgcgccgggtctacgcaaggagtggtctatgccggaaggaccggagatccgccgggcggcggacaaactggcggcggcggtgatcgatcagccgctgaccgccgtcgatttcgcttttcctcagctgaaacattatcgccagcgtttgctcggcgagcgcatcgtcgccatcgagccgcgcggcaaggcgctgttgacccacttttccaacgggctgacgatgtacagccataaccagctgtacggcgtgtggaaagtggcggcggcgggggagacgccggagaccaagcgcgatctgcgggtgcggctggaaaccgcccaccgcgcgatattgctctacagcgcttccgacattaccgtcgggccgcgcgaggaaatagagcaacacccgtttttgcaacgcatcggccctgacgtgttggacatgtcgctgacggtagacgatgtggtggagcggttgctgacgccgcgttttcgccgccggcagctgagcggcatgctgctcgaccaggcgtttctcgccggattgggcaactatctgcgcgccgaaatcctgtggcaggccgagttggcgccgcagcacaaaccacaggatctggcgccagaggcgctgcgccacctggcggaggcattgctggcggtgccgcgcctttcctaccagacgcgcgggcaggcggatgacaaccgccatcacggcgcgctgtttcgcttcaaggtgtttcatcgcagcggcgagccctgtgagcgctgcggtgggatgatcgtgcgcaccgagctgtcgtcgcggccgttttattggtgcccgggctgccagaaataagcaaaaaaaaacgccgcccgaaggggcggcgctgtgcggtttcagccggggaagcggcttacttggttttcagctgggatttgaaatcacgctcggcatagccggtgtacagctgacgcggacgggcaattttgatgccttcgtcgtgcatttcgttccagtgggcgatccagccgatggtgcgcgcgatggcgaagatcacggtgaacatggaagaaggaatgcccatcgccttcaggatgatgccggagtagaagtcgacgttcgggtacagtttcttctcgatgaagtacgggtcgttcagcgcgatgtgttccagctccatcgccacctgcagcaggttgtcgtccttcttgttcagctctttcagcacttcgtgacaggtctcgcgcatcacggtggcgcgcggatcgtagttcttgtacacgcggtggccgaagcccatcaggcggaaggagtcgttcttgtccttggcgcgcttgatgaattccggaatgtgctcgacggtcttgatctcttccagcattttcagcgccgcttcgttggcgccgccgtgcgccggcccccacagggaggcgatgccggccgcgatgcaggcgaacgggttggcgccggaagagccggcggtgcgcacggttgaggtagaggcgttctgctcatggtcggcgtgcaggatcaggatgcgatccatggcgcgttccagtaccgggttcaccacgtactcttcgcacggggtggcgaacatcatgtgcaggaagttgccggcgtaggacagatcgttgcgcgggtaaacgaacggctggcccagggagtatttgtagcacatcgccgccacggtcggcattttggacagcagacggaacgcggtgatttcacggtgacgctcgttgttgacgtccagcgcatcgtggtagaacgccgccagcgcgccggtcacgccgcacagcaccgccatcgggtgcgagtcgcgacggaagccacggaacagatgggtgatctggtcgtggatcatggtgtggcgggtcacggtggtcttgaaggtttcgaattcttccggcgttggggtctcgccgtacagcaggatgtagcacacttccaggtaggaagattctttcgccagctgctcgatagggaagccgcggtgcagcagcacgcctttgtcgccgtcgatgaaggtaatcttggattcgcaagaagcggtggaggtaaagccgggatcaaatgtgaaataacctttggaacccagagcgcggacatcgaggacatcggggcccagtgtcggtgtcaatacgcccagttcgatcggagcttcgctgtcgttaatggttagcgtcgctttcttatcagtcatttactgtctccttagcgccttattttaaaaaccactaacaactgaaataccttaaatctctgcaggttgcccgcaaaaaaatggtgcggacgctaactctgtgagcgactgcgcaactgtgcgcgggtagggtacagagtgctgaccaggcgaacgagacgggtgaccagttgttaacgattcatagtaattcgttatagtctgttaatcttacctatgagctgttcgaagagatgtgaacctatcccaataatctgtttttgtgtgctttatttgctttagacgccggcaaactcgagcgggaaacaacggctattgggataggttcgccaaatacactgttgcataactcgaacccgggaggaagtgtatctgctgacccatagcgcatcataggaccgtttgtgcccctatatgtaatggaaatgttgatctcttgtcaaatcagataattaattttgcactaattgtgaaatccgtgatctgaatcactgttcgggggaaatgttatcaaagcggttgtatgagaattgtaatcagaatgtgatcctcctatactgccgccaggtctccggattaccctgaagtaggagcacccagcgttataaatgcgcgccgtttgagcacagaggatgttgatgtttgagcgcgtgacgtgtaagggttttaggctcttaacgctgtctgatccccgcccaggcccggaggaaggaaaataataagagctgtgtgggcaaatacgtgaaaaaacaacgacctgtcaacttggatctgcaaacgatccggttccccgtaactgcgatagcgtctatcttacaccgagtctctggcgtaattaccttcgttgccgtgggtatcctcctctggctgctgggcctgtcactctcttcccaagaggggttcctgcaggcggccgccatcatgaatagcttcatcgtcaaattcatattctggggcatcctcacggcgctggcctatcacatttgcggtggcatccgtcacttgttaatggattttggctacatcgaagagagtttggccgccggcacccgttccgcccaggtggcgatcggtctgaccgtcgtgctgtcagttctggctggagtcctcgtatggtaaacaacgtttctgcattagggcgcaacggcgtgcacgattggctgctgctgcgcgcttccgctatcatcattaccctgtacgtcctgtatatcctgggctttttcgtcacggctccggaactcacttatgacatctggcgcggtttcttcgccacttccattacgaaagtgttcactctgctgaccctgctgtcgattctggtgcacgcctggatcgggctgtggcaggtgctgacggactacgtcaagccgctggcggttcgcctggtgttgcagctggctgtcgtggtcgcgttgctggtctatttactgtacggaacaatcgtagtgtggggtgcttaaatgaaactgccagtcagagagtttgatgccgtcgtaatcggcgccggcggtgcgggcatgcgtgccgcgctgcaaatttcccaagcgggctcgacctgtgccctgctgtccaaagttttcccgacccgttcccataccgtgtctgcacagggcggcatcaccgtcgcgctgggcaacagccacgaggacaactgggaatggcatatgtacgacacggtgaaaggttccgactatatcggtgaccaggacgccatcgaatatatgtgtaaaaccggcccggaagcgattctggaactggaacacatggggctgccgttctctcgtctggacgacggccgcatctatcagcgcccgttcggcggccagtcgctgaacttcggcggcgagcaggcggcgcgtaccgcagccgcagccgaccgtaccggccatgcgctgctgcacaccctgtatcaacagaacctgaaaaaccacaccaccatcttctccgagtggtatgcgcttgatctggtgaaaaaccaggacggcgcggtggtcggcaccacggctatctgcatcgaaaccggtgaagtggtttacttcaaagccaaggccaccgtgctggcgaccggcggcgctggccgcatttaccagtccaccaccaacgcccacatcaacaccggcgacggtgtcggcatggcgctgcgcgccggcgtgccggtgcaggacatggaaatgtggcagttccacccgaccggcatcgccggcgcgggcgtgctggtgaccgaaggctgccgcggcgaaggcggctacctgctgaacaagcacggcgagcgcttcatggagcgttatgcgccgaacgccaaagatctggcgggccgcgacgtggttgcccgttcgatcatgatcgaaatccgcgaaggccgcggctgcgacggtccttggggcccgcacgccaagctgaagctggatcacctgggcaaagaggtgctggaatcccgtctgccgggcattctggaactgtcccgcaccttcgcgcacgtcgatccggtgaaagagccgatcccggttatcccaacctgtcactatatgatgggcggcattccgaccaaggtgaccggccaggcgctgaccgtgaacgagaaaggtgaagacgtggtgatcccggggctgttcgccgtgggcgaaatcgcctgcgtatcggtgcacggcgccaaccgcctgggcggcaactcgctgctggatctggtggtgttcggccgttccgccggcatgcacctgcaggaatcgctggaagagcagggcgtgagccgtgacgccagcgactccgacgtggaagcctcgctggatcgtctgaaccgttggaacaacacccgttccggcgaagacccggtcgaaattcgcaaagcgctgcagtcttgcatgcagcacaacttctcggtattccgcgaaggcgatgcgatggccaagggcctggaagaactgaaagtgatccgtgaacgtttgaagaacgcacgcctggacgatacctccagcgagttcaacacccagcgcatcgaatgcctggagttggataacctgatggagaccgcgtattccaccgccgtgtcggccaacttccgtaccgagagccgtggcgcgcacagccgcttcgactatccggaacgcgatgacgccaactggctgtgccattcgctgtatctgccgcaatcggaaagcatgacgcgccgcgaagtgaacatgcaaccgaagctgcgcccggcattcccgccgaaagtgcgttcttactaattgcggagatcgacagatgaaactcgaattttccatttatcgctacaacccggatgtcgacgatgccccgcacatgcaggactacaccctggaagcggaagaaggccgtgacatgatgctgctggatgcgttgatccagctgaaagaaaaagacccgaccctgtcgttccgtcgctcatgccgcgaaggcgtgtgcggttccgacggcctgaacatgaacggtaaaaacggcctggcgtgcatcactccggtttcgtcgctgcgcaaaggcaacggcaagatcgtgatccgtccgctgccgggcctgccggtggtgcgcgatctggtggtggatatgggccagttctatacccaatatgaaaagatcaagccatacctgctgaacgacggcaagaacccgccggcgcgcgagcacctgcagtcgccggagcagcgcgccaagctggacggtctgtacgagtgcatcctgtgcgcctgctgttcgacctcttgcccatcgttctggtggaacccggacaagttcatcggcccagccggtctgttggcggcgtatcgcttcctgatcgacagccgtgacacggaaacgcaagaacgtttagatgatctggacgacgcttttagtgttttccgctgccatagcattatgaattgtgtcagtgtatgtcctaaaggcttgaacccgacgcgtgcgatcgggcatatcaagtccatgctgctgcaacgcggcgcataaacggaatgagatgctgcgccgggctcttttccggcgcacgtcccataggggagggaacctctaaaaactgacccgcggctgcggcgctatgcagcctggttcttccgccggtttttagaggttccttgtaagggaccgcaaggtccataacagaacgtatcgggccgacatggccgcaagtacgtcgagtgaaccgttttacggcaaaccgtattcatcacggtaattatgttaaccacggcgaaaactaaagcttcaaagcttaagggatcatgatgcagaacggcgcaatgaaggcctggctggattcctcctatctggcgggcgcgaaccagtcttacatagagcagctctatgaagacttcttaaccgatccgggttccgttgaagatagctggcgttccatttttcaacagctaccaaccgcgggtgtcaaacccgatcagcttcactctcaaacgcgcgattacttccgccgcctggcgaaagactccgcgcgctacaacaccaccatcaccgatccggaaaccgacgccaaacaggtcaaggtactgcagctgatcaacgccttccgcttccgcgggcatcagcatgccaacctcgatccgctcggcctgtggcagcgcgagcaagttcctgaccttgatcccgcttaccacaacctgaccgaagccgatttccaggaaaccttcaacgtgggctctttcgccatcggcaaagaaaccatgaagctgggcgatctgtacgccgcgctgaagcagacctattgcgggtcgatcggcgctgagtacatgcacatcaccaacaccgaagagaaacgctggatccagcagcgcatcgagtcggtggtggggcgcgccagctttaccgccgacgaaaaacgccgtttcctgaacgagctgaccgcggcggaaggcctggagcgctacctgggcgccaaattcccgggcgccaaacgcttctcgctggaaggcggcgacgcgctggtgccgatgctcaaagagatggtgcgccacgccggcaagaacggcacgcgcgaagtggtgttgggcatggcccaccgcggccgtctgaacgtgctgatcaacgtgctgggcaaaaagccggccgatctgttcgacgaattcgccggcaagcataaagaacacctcggcaccggtgacgtgaaatatcaccagggcttctcctccgacgtggaaaccgaaggcggcatggttcacctggcgctggcgttcaacccgtcgcacctggagatcgtcagcccggtggtcatggggtcggttcgcgcccgtcgcgatcgtctggacgaagcgcgcagcaacatggtgctgccgatcaccatccacggcgacgccgccattaccggccagggcgtggttcaggaaaccctgaacatgtctcaggctcgcggctacgaagtgggcggcaccgtgcgcatcgtcatcaacaaccaggttggcttcaccacctccaacccgctggatgcgcgctctaccgaatattgcaccgacatcgccaaaatggttcaggcaccgatcttccacgttaacgcggacgatccggaagccgtggccttcgtcactcgcctggcgttggatttccgtaacacctttaagcgtgacgtgatgatcgatctggtctgctaccgtcgccatgggcacaacgaggccgatgagccgagcgccacccagccggtgatgtatcagaagatcaagaaacaccctacgccgcgcaaaatctacgctgacgttctgaccgaacagaaagtggccagcctggaagatgccacggaaatggtcaacctgtatcgtgatgcgctcgaccgcggcgattgtgtggttgaagaatggcgtccgatgaatctgcactccttcacctggtcgccgtacctgaaccacgagtgggacgaagagtacccgagcaaggttgagatgaagcgtctgcaggaactgggccgccgcatcagcaccgtgccggaagcgatcgaaatgcagtcgcgcgtggcgaaaatctacgctgaccgcgccgagatggccgcaggcaacaagccgttcgactggggcgccgccgaaacgctggcctacgccaccatggcggatgaaggcattcccatccgcatctccggcgaagacgccggccgcggcaccttcttccaccgtcacgcggtggtgcacaaccagaaaaacggttcggtctacgttccgctggcgaacatccacagcggccagggcgaattcaaggtctgggactccgtgctgtctgaagaagcggtgctggcgttcgaatacggctacgccacggcggaaccgcgcacgctgaccatctgggaagcgcagttcggcgacttcgccaacggcgcacaggtcgttatcgaccagttcatcagctccggcgagcaaaaatggggccgtatgtgcggcctggtgatgctgctgccgcacggctatgaaggccagggccctgagcactcttccgcgcgtctggaacgttatctgcagctgtgcgctgagcagaacatgcaggtgtgcgtcccgtctacgccggcgcaggtttaccatatgctgcgtcgtcaggcgctgcgcggtatgcgccgtccgttggtggtgatgtcgccgaagtcgctgctgcgtcatccgctggcgatttcttcgctggacgagctggccaacggcaccttcctgccggcgatcggcgagatcgacgacttggatccgaaagcggtcaagcgcgtcgtgctgtgctccggcaaggtctactacgacctgctggaacagcgtcgcaagaacgagcagaaagacgtggccatcgtgcgcatcgagcagctgtatccgttcccgcatcaggccgtgcaggccgtgctggagcaatactcgcacgtgcatgatttcgtctggtgtcaggaagagccgctgaaccagggcgcctggtactgcagccaacacaacttccgtgaagtggtgccgttcggggcttctttacgttacgcaggacgtccggcctccgcttctccggcggtgggctatatgtccgtacaccagaagcagcagcaggctctggtgaacgacgcgctgaatattgactaatgttcgctcgcttgccggccgaggagccggcaagcagatgataaaaaacttaagggaaagctaaatgagtagcgtagatattctggttcctgaccttcctgaatcggttgccgatgcgaccgtagccacctggcacaaaaaaccgggcgacagcgtgcagcgtgatgaagtcctggttgaaatcgaaaccgacaaagtggtgttggaagtgccggccagtgaagcgggcattctcgatgctatcgtggaagaagagggcgcgaccgtgctgtctcgccagctgctcggccgcattcgcccaggcgacagctccggcaaaccgaccgccgagaagagccaggagaaagagtccacgcctgcacagcgcgcgaccgcgagcctggaagaagaaagcaatgacgcgctcagcccggcgattcgccgcctgatcgccgaacatgacctcgatgccggcgccatcaaaggcaccggcgtgggtggccgcatcacccgtgaagacgtggaagcgcacctggccaaaggcggcgctgccgccaaaccggccgccgccgctgaagccgcaccgcagccggctctggccggccgcagcgaaaaacgcgtgccgatgacccgcctgcgcaaacgcgtcgccgagcgtctgctggaagcgaagaacagcaccgcgatgctgaccaccttcaacgaaatcaacatgcagccgatcatggatctgcgcaagcagtacggcgaagccttcgagaaacgccacggcgtgcgtctgggcttcatgtccttctacatcaaggcggtggttgaagcgctgaagcgcttcccggaagtgaacgcgtctatcgacggttccgacgtggtttaccacaactacttcgacatcagcatcgcggtttctaccccgcgcggcctggtgacgccggtactgcgcgatgtagacgccatgagcatggctgacatcgagaagaaaatcaaagagctggccgttaagggccgcgacggcaaactgaccgtggaagagctgaccggcggtaacttcaccattaccaacggcggcgtatttggctcgctgatgtccaccccgatcatcaacccgccgcagagcgccatcctgggcatgcacgccatcaaagatcgcccaatggcggtcaatggtcaggtggtgatccagccgatgatgtatctggcgctgtcttatgaccaccgcctgatcgacggtaaagaatccgtcggttatctggtgacggtcaaagagatgctggaagatccggctcgtctgctgctggacgtctagtaacccttgccgggcgcggcgtgccgcgcccgcactctgtgctatgtggccggaaaaccatgcggtttaccgcgcaataatggtccggctaaaaaccttcagaactgaatggatagaacatcatgaatttacacgaatatcaggcaaaacagctgtttgctcggtatggcatgccggcaccgaccggttacgcctgtaccactccgcgtgaagcagaagaagccgcatccaaaatcggctccggcccgtgggtggtgaaatgtcaggttcatgctggcggccgcggtaaagcgggcggcgttaaagtcgtcaacagcaaagaagatatccgtgctttcgcggaagcctggttgggcaagcgtctggtgacttaccagactgacgcgctgggccagccggttaaccagatcctggttgaagcggcgaccgacatcgataaagaactgtacctgggcgccgtcgtagaccgcgcgacccgtcgcatcgtattcatggcgtctaccgaaggcggcgtggaaatcgagaaagtggcggaagaaaccccagaactgatccacaaaatgaccatcgatccgctggcgggtccacagccttatcagggccgtgagctggccttcaaactgggcctgaccggcaagcaagtcagccagttcgccaagatcttcatgggcctggcgacgctgttcctggagcgcgacctggcgatggttgagatcaacccgctggtgatcaccaagcagggcgatctggtgtgcctggacggcaaactgggcgccgacggcaacgccctgttccgtcagcctgaactgcgtgaaatgcgtgacccttctcaggaagacgagcgtgaatcccgtgcggcccagtgggagctgaactacgttgccctcgacggcaacatcggctgcatggtgaacggcgccggtctggcgatgggcaccatggacatcgttaaactgcacggcggcgaaccggccaacttcctggacgttggcggcggcgcgaccaaagagcgcgtgaccgaagcgttcaaaatcatcctgtccgacgacaaggtgaaagcggttctggttaacatcttcggtggtatcgtacgttgcgatctgatcgctgacggcatcatcggcgcagtggctgaagtgggcgttaacgtcccggtcgtggtgcgcctggaagggaacaacgccgaactgggcgccaagaaactggcggacagcggcctgaatatcattgctgcgaccagcctgactgatgcggctcagcaagttgttgcagcagtggagggtaaataatgtccatcttaatcgataaaaacaccaaagtaatttgccagggcttcaccggtagccaggggactttccactccgaacaagctatcgcttacggcaccaaaatggttggcggcgtcaccccaggcaaaggcggcactcagcacctggggctgccggtgttcaacaccgtgcgcgaagcggttgaagcgaccggcgcgacggcctctgtcatctacgttccagcgccgttctgcaaagactccattctggaagcgatcgatgccggcatcaaactgatcatcaccatcaccgaaggcatcccgaccctggacatgctgaccgtgaaagtgaagctggacgaagccggcgtgcgcatgatcgggccgaactgccctggcgtgatcaccccgggcgagtgcaaaatcggcatcatgcctggtcacatccacctgccgggcaaagtgggcatcgtttcccgctccggcaccctgacctatgaagcggtgaaacaaaccaccgatgccggtctgggccagtccacctgcgtgggcatcggcggcgacccgatcccgggctccaacttcatcgatatcctgaagatgttccaacaggatccgcagaccgaagcgatcgtgatgatcggtgagatcggcggcagcgctgaagaagaagcggcggcttacatcaaagaacacgtcaccaaaccggttgtcggctacatcgccggcgtgaccgcgccgaaaggcaagcgtatgggccacgcaggcgccatcatcgccggcggcaaaggcacggcggacgagaagtttgctgcgctggaagcggcgggcgtgaaaaccgtccgcagcctggcggacatcggcgatgcggtaaaagcggtgctgaagcgctaagaacctagtacgaaataacaatatctcgacatgtttggccacccattgggtggccttttttatgggcgaaactcagaaaccgttgagcgccttgatcagcgcgatccgatcctgcaggcggcgctgctgcaccggatccgcggcggcttgccgctgctgctccagcgaggcgagggcggcgcggtaatcgtcggcgttgcggaacagcgcgtctttgacgttgatcgaggcgacgttggtgtagcggccatcgtcggtggtcggcacctgaataacgccttcattcagcagccgtttaacgatcgcccgctgcggttcgtatccctccatgccgatcagtttccagcgctgcggcggcacgccctggtattggccgtgtttcacttccgtcaggtagcgcagggccaggtggcgaatggtgccttcttcttcaccgtactgcgctttgctgtcgaacagcaccgggaaggattgcccttccagcgcgccgcccttttgcgtcaggtggcccatacggtaactgttcatgcccagacggatcggcatgtcgtccgtgaccggcgtgccgtccgccagatgcagatcgacgatgcgtgaaccggcgggttggcgcagatcaatggtataggtgacgccatcgaagaaatcgttggtggaatatttggacgaacgccgcgccgggttaaagctgtaggtgacgtcgcccggctgcagctgattgaagtagccggcggaccactccatgtagcgtttaagcgctttaccgttaagctgataaacggtgatctcgccaccggcgtattggtagttaaaggcgatatccttggccttgatgtcgccgacgtccagtttggcgcgatcgttgtcgatctgcagggcgatcacctgcgccagcggcgcatagtgccgggcggcctgctggaacagcgcgctgatgccggtgtcctgcacgtgcacctgaggaatgccgcggaactcgtcggcaggcaccagatcgctgccgctcagcttcgctaccacccggttggcgttggcgcgcaaaatgtcatgatacggctggtagagagcctgcatggcgctgtccggcgtcagccctttgatcgggtaggtgtagctgtttttgtcgatcagcgtgaatttgccgtcgcggcgttcaaattgcagatcgatacgtgacagcgcgcggccgtatttgtccggttcggtgatgatgacgccgttgaccaccgccttgtcgatcttcacatgcatgtggccggcgacgattgccgccagttccgggttggcgttggcaatgtcggccacgccggtgcccgggcgctggttctcgttgtcgatgcccatatgcgccaccagtacgatggcgtcgacctggccgtcgatttgtttgatgacctgtttcaccgcctgcaccggatcggtgaagttcagccctttgatgcgatcggtgcccttggcgaattcagcggtcatcggcgtgtccatgccgataatgccgatcttcacgccctgacgttcgaggatggtgtaggccggcagataaggcttgccgttgtcccagacgatgttgcccgccagcgccgcgcccttgaactgcttgagcggggtggccagcaccggcaggccgaagtcgaactcgtgattgcccatcacccagacgtcgtaattgagcgcattgaggcccagcatcatcgggctgatggcctcatgcttgaaggtttcaacgaagttgccctgaatagtgtcgccggcgtccaccaggatcaggttaggctgctcggcgcgcacctttttgacctgagtggctatctggctcaggctgcccgccaggttttccgtgtcgctggcgtagtcccagggcacgaaggtgccgtgcagatcggaggtgcccagcagggtgatgtttaccgtttcggcggccatggcgtttcccgagagtcccaagacagaggcaaagatgatttttttcataacttattgtcactcaatggaattttaacataagtggtcattttgctacaaaatcgcaacctttacgatcccatcgcgagaaatagactaatattggagagagatttgttgttttgtgactgcaatcactgtcacggcttaatggaaataaaaggttaattatgtcgcagaataagcgcgtaataatacaatggcggctcttttaaattacatttatttaacacaaaaatatcattaaaaaacaattaaaccattgcgcaacatgccctcaagaaaaataggcgaaatgtgctgatgaatatggaaataatatgcggataggcttaaattgtctcagatcaaattagcccgaagtacctctttcggctaagatttgacctgtaaccaaaagtccaacccacgtcacgtaaaaacctatttattgtgtgggattgggcgagtatcatccatgttgtgattatggatggttgatcttgttgcatttgttacccgttgtcggttttcagtggcgtgcttgtcggcggcccgaggggctattggccgagtgtgcggttgaaagcggagaagctggatcaaatttgttgtgtttaagggcattcactgcggggcgttactggcggctttgaaagaagtatgccgataaccgcgtgtcggagtcttcctgcgaggagcaaggagtcaagatgtttgatattgtcgaactgtcgcgcttacagtttgctttaacggcgatgtaccatttcttatttgtcccattaacgctcggtatggcgttcttgctggcaattatggaaacggtatatgtcctgtctggcaaacaaatctataaagacatgaccaaattctggggaaagttatttgcgattaactttgctctgggtgtggccaccggtttgaccatggagttccagttcgggactaactggtcgtatttctctcactacgtcggcgatatcttcggggccccactggccatcgaaggtttgatggcgttcttccttgaatcgacgctggtcggcctgttcttcttcggctgggatcgtctgagcaaggtgcagcacatggcggtaacctggttcgtggccctcggctcaaacctgtccgcgctgtggatcctggtcgccaacggctggatgcagaacccgatcgcgtcggatttcaacttcgaaaccatgcgcatggagatggtcagcttctccgagctggtgcttaacccggttgcgcaggtgaaattcgttcacaccgtggctgcaggctacaccaccggcgccatgttcgtgctgggcatcagcgcttactacctgctgaagggccgcgacatcgctttcgccaaacgctccttcgccatcgccgccagcttcggcatggctgcggtgctgtcggtgatcgtgctgggtgacgaatccggttacgaaatgggcgacgtacagaaaaccaaactggccgccatcgaagcggagtgggatacccagccggcaccggcgtccttcaccctgttcggcattcccgatcaggacaagatggaaaactccttctctattcagatcccgtatgcgcttggcctgatcgccacgcgttccaccgacacgcaggtcactggcctgaaagatctgctggcgcaacatgaagtgcgcatccgcaacggcatgaaagcctaccaactgctggaagagttgcgcggcggcaataccgatcctgcggtgcgtgcggaattcaacaaaaccaagcaagacctgggctacggcatgctgctgaagcgttataccccgaacgtcagcgacgcgacggaagcgcagatccagcaggcgaccaaggactccattccacgcgtggcgccgctgtacttcgccttccgcatcatggtggcctgtggcgtgctgatgctgctgattatcggcctgtccttcctgagcgtggtgcgcggccgcatcggccagaagaaatggctgttgcgtgcggcgctgtatggcctgccgctgccgtggatcgcggtggaagccggctggttcgtggcggaatacggccgtcaaccgtgggcgattggtgaggtgctgccgactgcagtcgccaactcttcgctgaccgcgggcgacattctgttctcgatggggctgatttgcggcttgtacaccctgttcctggtggctgaaatgtacctgatgttcaagtttgcgcgtctgggtccaagcagcctgaaaaccggccgctaccactttgaacaaccgactgccgccgtgcaggaagcgcgctaaacaggagtccacgtatgtttgactatgaagtactgcgatttatctggtgggtgctggttggcgtactgctgatcggcttcgccgtcaccgacggtttcgacatgggcgtcggcatcctggtgcgcatcatcggtaaaaccgataccgagcgccgggtgatgatcaactccatcgccccgcactgggacggtaaccaggtgtggctgatcaccgccggcggcgcgctgttcgccgcctggccgatggtctacgcagcggccttctcgggcttctacgtcgccatgatcctggtgctggcggccttgttcttccgcccggtcggttttgactaccgttccaagctggagagcagccgctggcgcaacatgtgggactggggcatcttcatcggttccttcgtgcctgcgttggtattcggcgtggcgttcggcaacctgctgcagggcgtgccgttccatgtggacgaatacctgcgtctgttctacaccggcaacttcttccaactgctgaatccgttcggtctgttggcaggcgtggtcagtctgaccatgctggtcactcagggcgcgacctacctgcagatgcgcaccaccggcgagatccacctgcggtcacgcgccgcagcgcagatcgcgacgctgatcatggcggtatgcttcctgctggcgggtgtgtggctggtgaaaggcatcgacggctacgtgatcacttcggcgctggacaccatggcggaatccaacccgctgcgtaaagaagtggcgcatcaggccggcgcatggctgatcaacttcaacaagtatccgctgctgtgggccttgcctgcactgggcgtggtgctgccgttgttcaccatcctgttctcgcgtctggagaaaggcgcgctggcgttcgtcacttcgtcgctgaccatcgcctgcgtcatcctcaccgccggggtcaccatgttcccgttcgtgatgccgtccagcaccgtgcctaacgtcagcctgaccatgtgggacgcgacgtcgagcctcttgacgctgaaagtgatgaccgtcgtggcggcgatcttcgtgcctatcgttttggcgtacaccagctggtcgtactacaaaatgttcggtcgtctcgacaagaactacatcgaaaacaacaagcattcgctgtactaaggataaggagctaaaccatgtggtattttgcctggattctcggaacgcttcttgcctgcgccttcggcatcatcacggcgctggcgcttgagcagagcgaagcgaccaaagctcagcaagacggtaagtaatgagctcgtccgtgattgacaagctgtacgctgtcaccgacaagggcccggttcgggccctttccctggtgctggcgttgattttggcggggtgtgtgttctgggatccgacgcgtttcgccgccaaaaccagctcgctggagatttgggaagggctgttgctgatttgggccgtatgtgccggagtgatccacggtttcggattccgcccgcagcgcagcgtctggcgcgcttttttcgcgccgcttccagcaattgtgatcttgtgcgcaggattactttacgtttctttataatctccccgatgtccccacgttatgggccctcacggcccataattattttcattcccatcttgtaacccattcccaacccgatccgtcttgcgtatagtagcagcgttaaattgcattgctgggaagtagagtgagtaatacgttgtttcgatggccggttcgcgtttactacgaggataccgatgccagtggtgtggtctatcacgcccgctacgtcgccttttttgaaagagcgcgcacagagatgctgcgtcagcacaactttcatcaacagcagctgctcagtgaacaagtcgcttttgtcgtccggcgcatgacggtggattatctggctccggctcgtctcgacgagcaactggaggtccagagtgaaatcacctctctgcgcggggcttctctcacgtttgctcaacgcattgtcaattctgacggggctctactgagccaggcagatgtcctgattgcctgtattgatccacaccaaatgaagccaagagcgcttcctaagtctattgtcgcggagtttaagcagtgactgacatgaacatcctagatttattcttgaaggcgagcctgctggttaagcttatcatgttgattttgatatgcttctcggtagcctcttgggcgatcatcattcagcgcacccgcatcctcaatgcggcgacgcgtgacgccgaagcctttgaagacaaattctggtccggtatcgagctttcccgtctgtaccaggaaagtcaggcgcgtcgcgatagcctgaccggttccgagcagatcttccattccgggttcaaagagttcgcccgtctgcaccgcgccaacaatcatgcgccggagtcggtgatcgaaggggcgtcgcgcgcgatgcgcatttcgatgaaccgcgagctggaaacgctggaaacccatattccgttcctcggcaccgtcggttctatcagcccgtacatcggcctgttcggcaccgtgtgggggatcatgcacgcctttatcgcgctgggcgcggtgaagcaagccacgctgcagatggtggcgccgggtatcgccgaagcgctgatcgccaccgcgatcggtctgttcgccgccatcccggcggtaatggcctacaaccgtctcaaccagcgcgtcaacaagcttgagcagaattacgacaactttatggaagagttcaccgctattctgcatcgtcaggccttctccagcgacagcaaataagtaggaggtagcatggcgagagtacgtggacgtagtcggcgtgagctgaagtccgaaattaacatcgttccgctgctcgacgtgttgctggtgctgctgctgatttttatggcaaccgcgccaatcatcacgcagagcgtggaggttgacctgccggacgccaccgattccaagacggtgtccagcgatgacaatccgccggtgatcctcgaggtttccggcgtaggtcaatacaccctggtggtggatcacaaccgtatggagctgctgccgcctgagcaagtcgcggccgaagccaagtcgcgtttggcggctaacccgaaaacggtctttttgatcggcggtgcgaaggaagtcccttacgatgagattatcaaggcattgaatattctccatcaggcgggcgtggcttccgtggggctgatgacccagccgatctgaccgtaaggccaacggcaacccggttcctgcgctgcggcccaggaaccccgtataagcaacaccagtttttgggaatctattttggtaaaggcaactgagcaaaacgataagctgaaccgcgccgttattgtttcggtcgttctgcacttcatattgattgccctgctgatttggggatcgctgcaggaaaaggtcgacatgggcgccggcggcggtggcgatggcaccgtggtcggtgcggtgatggtcgatcccggcgcggtggtggagcagtacaaccgccagcagcagcagagcaacgatgcgcagcgtgccgaaaagcagcgccagaaaaaagcggagcaacaggccgaagagcttcagcagaagcaggcggagcagcaacagcgcctgaaagagctggagaaagagcgtttggcggcgcaggagaaagccgcgcaggacgccaaggcgcaggctgagcaacagcagaaggcggcggagcagcaaaaacaggccgccgagcagcaaaaagcggcggaagccgccgcagccaaggccaaagagcaacagaaggtcgccgaagccgctgccgccaaggcgaaggccgaagcggacaaggtcgccaaggcgcaggcggaagcccagaagaaagccgaagcggaagccaagaaagaagcggctgctgccgccgccgccaagaaacaggcggaagaggcgaagaaagccgccgccgccgcggcagaaaagaaagccgcagaggccgcggagaagaaagcggccgctgaagctgagaaaaaagccgcagcggaagccgagaagaaggctgccgccgaggcagagaagaaagcggcggccgagaaagccgctgccgccaagaaagccgctgcggacgccaagaagaaggccgccgccgaggctgcgaagcagtcggcggaagttgatgacctgtttggtggcctggcggacggcaagaacgcgccgaaaggcggcggtgccaaatcgaaaggtgatggtaaaccggccgggcagggcaatgccaaaacggctggcgccagcggggcggatatcagcggttatatggggcagatccaaggggcgattcagagcaaattctatgacgccagttcgttcgccggcaaaacctgcgacctgcgtatcaagctggcgccggacggcctgctgataagtgtacaagcggcgggcggcgatcctgctttgtgtcaggccgcggtctctgccgccaagttggcgcatataccgaagccgccgagcgatgccgtttatcagcactttaagaattctatccttgaattcaaaccgcaataacggttgattgagtgagtaatatcacagggatgtactaaggtaaccaacagggattatgtagttttgcgtaagttggtttgttaaaattctgctaatttatcgcaggcatcccgcctggataagggagatgagatgaagcaggcatttcgagtagcgctaggttttttaattctgtgggcgtccgtgttgcacgcggaagttcgcattgaaatcacccaaggggtcgactccgctcgcccgattggcgtggtgccgtttaaatgggcgggcccaggcacgccgccggaagatatcggcaagattgtcggcgcggatctgcgcaacagcggcaaattcaacccgatcgacgtggcgcgcatgccgcagcaaccgacctccgcgtctgaagtgacgccggcggcctggactgcgctgggcatcgacgccgtggtagtcggccaggttcaacctggcgccgacggcagctacctgatctcctaccaactggtggacacctcgggttcgccgggcaccgtcttggcgcagaaccagtataaagtgaccaaacagtggttgcgttattctgcccataccgccagcgacgaagtgttcgagaagctgaccggtatcaagggcgcgttccgcacccgtatcgcctacgtggtgcagaccaacggcgggaaattcccgtacgagctgcgcgtagcggattacgacggttacaaccagttcacggtgcaccgttcgcctgagccgctgatgtcgccggcctggtcgccggacggcagcaaactggcttacgtgaccttcgagagcggccgctctgcgctggtggtgcagaccctggctaacggcgctatccgccagatcgcctcgttcccgcgccacaacggtgcgccggcgttctcgccggacggcagcaagctggccttcgcgctgtccaagagcggcagcctgaacctgtacgtgatgaacctcggctccggccagatcacgcagctgaccgatggccgcaacaacaacaccgaaccgacctggttcccggatggccagtctctggcgtttacctccgaccagggcgggcgtccgcagatttataaaatcagcgccagcggcggtgccgcacagcgtctgacgtgggaaggctctcagaaccaggattctgaagtcagctccgacggtaaattcctggtgatggtgagcaccaacagtggtgcacaacacatcgccaaacaagatcttggatcgggcgccgttcaggttttgaccggcaccttcctggatgaaacgcctagtattgcgccaaacggcaccatggtgatctatagctccacgcaaggtatgggctccgtgctgcagttggtgtcaactgatgggcgtttcaaagcgcgtcttccggcaactgatggacaggtcaaattccctgcctggtcgccgtatctgtgatgcatgtgtaaatatgtatggcaaactataaaaggatcaaagaaatgcaactgaacaaagtgctgaaagggcttctgctggcactgccagttctggctgtagcagcttgtagttctaacaaaagcgcgaacaacgaccaatctggtatgggcgctggcgccggcactggtatggaaaacggcagcagcaacctgtcttccgaagaacaagctcgtctgcagatgcaagaactgcagaagaacaacatcgtttacttcggcctggacaagtatgacgtaagctccgaattcgctcagatgctggacgcgcacgctgcattcctgcgtaacaacccgtcttacaaagtgaccgttgaaggccacgctgacgaacgcggcacgccggaatacaacatcgctctgggtgagcgtcgtgctaacgccgttaaaatgtacctgcaaggtaaaggcgtttccgctgaccagatctctatcgtttcttacggtaaagaaaaaccagcagtactgggccacgacgaagcggcttatgctaaaaaccgtcgtgccgttctggtttactaagagaatcgcatgaacagtaacttcagacgtcacctgttgagtctgtcgttactggttggcgtagcggccccttgggccgctactgcccaagcgccaatcagtaatgtcggctccggctcggtcgaagaccgtgtcacctcgcttgagcgcatcagcaatgctcaaggccagcttttaaaccaactccagcagcaactctctgacaatcaacgcgacattgattctctccgtgggcaaatccaggaaagccagtatcagttgaatcaggtcgttgaacgccagaagcaaatctatcaacagatggatagcctcagccagggcggcgctcagagcgcctctgcggcagcgggcgctgccggcggtgcagccgcaggcgcatcttccgatgcgggcagcagcgcgcctgcagccgcttctgcaacgccgagtggcggtgatgagaacagcgactacaacgccgctgtttctctggcgctggaaaaaaaacagtatgaccaggcgatttccgcctttcagtccttcgtaaaacagtacccgaagtctacttaccagcccaacgccaactattggctgggtcagttgttctacaacaagggtaaaaaagacgatgcggcctattattttgcggtggtggtgaagaattacgctaaatcaccgaaggcgcctgacgccatgtacaaggtgggtatcatcatgcaggaaaaagggcaggctgataaagccaaagccgtgttccagcaggtgattaaacaatacccaaccagtgcggcggccaagcaggcgaaaagtcgcgtaggcggttaacggttagaaaaatgagcccagaagttagtcgatttgaccgatttctgggctcattcgcgtgaagaacaagcagttgaacgcatcagtaaaaaatttaggttgcgctgccaagataaattagtaatatatgccgccgttgccaagacatcttgcaagatgttaaagcggcagggaaattgggtcgttagctcagttggtagagcagttgacttttaatcaattggtcgcaggttcgaatcctgcacgacccaccattcttagagaatggctgcaatagagaatcgtaaaggatgagaaccgtaaaggttcgagtctcgcaaagcgagacaacatcactccggtgatggcccgcaagggcgaggccaaaggccgagttatcctgcacgacccaccactcttagagaatggcagcttcagaataggtttgatgtggcaaagtaaaggtccgagtcgagtacccgtcgagttgtcctgaacatccccatccttgttttccgcgagtcggtttttgtaacctattcgccaccagcagtaaaccacatcagtgggtcgttagctcagttggtagagcagttgacttttaatcaattggtcgcaggttcgaatcctgcacgacccaccaattcagaaaaaagcgccttttggcgcttttttcgcatctgcagcaccccaacctgaatccctgctttctcgtttcaacaacacaccgatcatcatcccgcttttctctgaacgccatacgcccccaccaggacattatccgtcgtgatctgcgtggtcaatgtctgtgtttttaatctattaaacactgagtgcgtaaatatgaaaatatcagcggacttttcgcgcggttttaggtattttgtttagtatataaaactagggcgttgcggcaggcgatattcacgcggcaggcgcccagcctagcatgagattgcagcgatgagtgaaatgtttgatgtcaacgcggcggtgtatcccttcccgccgaaaccggtaccgctggacgtagcggaaaaagccttttatcgcgagaagatcaaaaccctgctcaagcagcgcaacgcggtaatggtcgcccattattataccgacccggaaatccaggcgctggcggaagaaaccggcggctgcgtggcggattcgctggaaatggcgcgttttggaagcgcgcatccggcttcgacgctgttggtggccggcgtgcgtttcatgggggaaaccgccaagatcctcagcccggaaaagcaggtgctgatgccgacgctgtttgccgaatgttcgctggatctgggctgcccggaagaggaatttcatgcgttttgcgacagtcatcccgatcgcaccgtggtggtttatgcgaatacctcggcggcggtcaaagcgcgcgctgactgggtggtgacctccagcatcgccgtcgaactgatcgagcatctggatagcctgggcgagaaaattatctgggcgccggatcgtcatctcggcagctatgtgcagaagcagaccggcgccgacgtgctgtgctggcaaggtgcctgcattgtccatgacgagttcaagacccaggcgctgcggcgcatgaaggcgctctatccgcaggcggccatcctggtgcatcccgaatcgcctcaggcggtggtcgagctggcggatgcggtgggatcgaccagccaactgattcaggcggcgaaaacattgccgcatcaacagctgattgtcgccaccgatcgcggtatcttttacaagatgcagcaggcttgtccggacaaggaactgttcgaggcgccgaccgccggagagggcgcgacctgccgcagctgcgcgcattgcccgtggatggcgatgaatggcctgaaggcgattgccgaagggctggagcaggggggcgcgcagcatgagatccacgtggacgccgcgctgcgtgaaaaggcgctggtgccgctgaaccgcatgctggatttcgccgctcagcttaagatgcaggttaaaggcaacgcttaaccgtttaaaaggatgacctcatgagcttcttcagtaccagcaatattctggtgcatattccgcttggcgcgggcggttacgatctgtcgtggatcgaagccatcggcacactgttcgggttgctgtgcatctggtacgccagcaaggaaaaaatcatcaactacctgttcggcctgatcaacgtcacgctgttcgcggtgattttcttccagatccagctgtacgccagcctgctgctgcagctgtttttcttcggcgccaacatttacggttggtatgcctggagccgccaaacccaggataaccaggccgagctgcagatccgctggctgccgctgccgaaagcgttggtctgggcggcggtttgcgtcatcggcatcggcctgatgactttcaacattgaccgcgtgttcgcctggctgacgcagattgcggtggcggtgatgcaagggctggggctgaacgtgcagatgccgacgctgcagccggacgcgttcccattctgggattcggcgatgatggtgctgtccatcgtggcgatgatcctgatgacgcgcaagtacgtggaaaactggttgctgtgggtggtgatcgatgtcatcagcgtggcgatctttgcctaccagggcgtgtatgctatggcgctggagtatgtcattctgacgctgatcgccctgaacggctcctggctgtggatcaagagtgccgggcgcaaccattccaatccgttatcttccgctccgtaataacagcagagggcgccgtgatggcgccctcttggcttagtggcgatgccccaggtgcgaatgcgcttcggcatgtgagtgttcactcggctccggcgcccggttgatgccgcagtccggcgtctcacagtgccggtactccatctgaatggtcacgtggccaatcttgtagtgttccaacagataagcctgaatgcgttgcaacagcccatcgtggtcatgcggcgggatcacctgcgcatgcagcgtcatcagcttctgttcgccgatctgccagacgtgtacgtggtggatattgcgcacttccgggatgttcaggcacaggtctttttgcagcttggcgatgtcgacctcctgcggcgtgccttccagcagctcgtggaagctctccttcagcagccgccaggcgctgcgcagcaccagacaggagaccagcaccgacaggatcgggtcaatcggcgtccagccggtggcaagaataacgatggcggcgacgatggcccccaccgagccgagcaggtcgcccagtacatgcagcgcggccgccctcacgttgatatttttctcttcgttgccgcgatgcagcagccagaaggcgaacaggttcgccagcagccccgctatggcgatgatcagcatcggagtgcccatcaccggctggggttcgaagaaacgccgtatcgcctcccacaggatgaataccacgatcaccagtagcgccgcggcgttgaggaaggccgccagggtggtcaggcgcagatagccaaaggtgtggcgcgcgttgggcttgcgctgggaaaagtgcaccgccatcagcgccaccagcagcgcggcggcatcggtcagcatgtgccccgcgtcggccaacagcgccagcgagccggacaacaggccgccgaccacctcggccaccataaagacggcggtgactaaaaaagcggtcagtaggcgtttactattactgtctttcggcaggtgtacgtgtggagtgtccgacattattcatccttatgcatagcgaaagtgggggcggcggcgagcagagcgtccagctccggttctatctgcgccactaacgcctttaatttagtataagcggcggcggcaaactcgccccgacgtgcggtttccaccagttgctggcacagctgcgcggcttccggcagctgaagcatcagcaggctgcccttgatgcggtgcgccgcctgttccaggcgtggccagtcgctcgcggcgacggcatccgcgagccgctgccggtcttgccgcagcgtgtcgctgagcgtctgcgccagccgctgcatcatggcgcgatcgccgcccgccatgtcggccagcatttgccgcaggtcagtaaggactaacttttcttcctgaacctgcggttgctgagccaatacctggccgatcgccgccagtgaaatcggcttggtcaggaagtggtcgatcgccaccagccctggcgggatgagggtaaactcctgcacgtctgccgagcagagcacgatgcggcaaggcgggcgccgtagccgctgttcgtcgcggcggatcagcctggccagcgtcaggccgtccgggcgcggcatgttatagtcgataaacagcagatcgaaaggctgccggcgctgagccttcagcagcgcatagccttgttcaaagcgggccggctgcagcccgaagtggcgcagctggcgttccagcaacaacaaattggtgggatggtcgtcgatcagcgcggtacgcaaggcggaagacggcagagcaaaggtgtgctcctcctgggcgccagccgtcgcggcgccgctcagctcgaccggtatcgcgacctcgacgcgggtgccgacgcccggctgcgagtgcaactcgatgcggccgcccatctgttcgacgatttctttgcagatcgacaggcccaaaccggtaccttgcaccgagatgcgttgcgcgccgcgcgcgcggtaaaacggttggaacaacttgcctacctcatcggcggcgatgccgcagccgctgtcgttcaccgttaactgcaactctccccgtcgttcatcctgtgcgcgccagccgacgtcgacctgaatggcgccgcgcggcgtgaactttatcgcgttgtttatcaggttgttagccacctgaagtaaacgctcaccatcaataatcaccgcctccggcagcgccggatccgccaccacgctcaaggtcaacggccgttcgccgataagcggccggtaaagggcgtcgatgcgcgcgacccaggggcgcagcgccaccggtttcggcgccagcgtcaacgacccggtttccagccgcgcgtgatcctgcaggtcgttgagcaggttgagcagcgatgaggccgaactgtaaatcaccggcaggccttccggcgcaggttggcgtttgagctccagttccagcaggccgaggatggcgtgcatcggcgtgcgcagttcatggctgacggtggcgaggaatttgctcttcatgcgattttccgcttcggcgcggcggcgcgcctgctcgagctcttcgcgttcgcgtttttcacggcgctgcagcatgaaacggcgcagcgtcagcgccagcagcagcacggtggcggcggccaacagcgccagcagccaggtggtctgcggcggcatgcggttgtcgttcaccgcgtcgatcaggttgctgcggtcgacgatccactcgtcgcgcagcgattgcagggtatccgccgggatctgcatcaggttcttatcgaggatcgccagcagcagcggttgatcgcggcgcacgccgaaggccaccggataggggatgttgttggcggcgaaggccagcttgatggcgccggaatagcgcgacagcgccaaaaagttggcggagatgacgttatccaccagcgcatccagctggccgttggccagcgcgtcgtacatcgatttgctgtcggcgaagcttacggtctgttcctgctccggcaccagcccctgagccaaatcgccctgcagtacgccgatgcgcttgccggccagatcgccccaggtcgagatgccgttggcatactggccgacgtaaacgccccacagcgaacggtggatcggcatgctggcgccgtagcgcgccttgacgccgcgcgccagcggcagggcggcgcggaagctggcctggccggattgcaccagccgatcggcctgctcggcgttgcgcgcccacagcggcgcgaaacgcagcccggtgttttgcgcgatgatgttgagaatatcgatggcatagccgcgcggctggccgtcggaaccgcggtaggcgaacgggaagttgttctcgatggcggcgtagtaaaccacgcggtggctcgccacccaattcttctccatcgtcgtcagatcggcattgccggtatcgaggtagctggggatctttttgctccagcggctctgcagggcattcatcagttccatcggcgcgtcggcgatggcggtgtccagcgtgtctatcaggcgcgggtcggcggcggcgaacacgaaggaaaggttgcccaggttctcgttgctttcaatctgatagagctggccgagctgcagctggtcgatgataaagctggcgctggcctcgtcggcgataaagtagtcgctgctgccgttcagcagcgaatagaccgcctgcagattgttgtcgtagcgctggatctgcgacgccaccgcctgcagggcgccgccggactgcatgtcggtcagcgcgccgatcgcgacgcgggcgttggcggaattgagcatcaccggccgatcgttgctgcgatcgcgcaatacgcgcaggttgctgacgtagtaaggctgggagatctccagcccgtgcagcgcttcgctctgcgggatgccgtacaacagatcgaccttgccgtcgtgcagcgcctgctccagctgggtcaggtcggcgaagccgtaaatggcgaagcggatgccggttacctgctggatatagccgaggtagtcggcgttcagcccatacagatcgtcatccacaatgatgttgtacgggctggtgttctcactgatgatgccgacgcgcagcgtgcggtcgcgccagggatttttctcgccgacgatcagcatattctcggggggattcaggttgctgaccagctgatagcgcaccggctccgccgcctgcgccaggccgcaccacaggatcagcagcagcagggcgcggcgcatcatggcgccagctctttaaacaccgccaccagctccagcaaattgccggcgccggttttgcgctggatgtttttcttgtgcgtgctgacggtcttgttgctgatgtgcagccggtcggcgatctgcaggttggacagcccctggctcagcaagcccagcacctcgagctccttgggcgtgagcagcccgccgtccgccgtcggcgcctcttcggccagcgcggcggcggggaagctggtttcaccgtccagcacctgctcgatcgcctgcaccaactccgccagcgagctgcctttattgacgaaaccgtcggcgccggcggcatgcgccatgcgcgcatacacatcggcctcttgcgcggtatagatcaggatcttttgttgcgggtagtggcggcggatttttttcaacagctgcagcccgtcgacctgcggcaggccgatatccaggatcaccaggccgaaagcggcctcggccagcagggccagcgcctgaacgtcgtcctgcgccgcctgcaggcggtaggcgcgggctgatttcattagcgccgcttccagtgcgacatggaccaccgggtggtcatcaactaataacagagagggcatgttcaactcgggtcactttatattccgatcgctagcatagcgaaaaaggaggctctgcgctcccctgatgaaacagcacaatctgctgttaatttggcggttccagcggcggggggcaaaggtgatttacagcgccattctcacaggctagattgttgggatctacaccgttacgcactgcgaaagaccccacgataccgaatggaaaagctatgaattaccaaaacgacgatttacgcattaatgatattaaggaactcctgccgccggtggctctgctggagaaattcccggccactgaacgcgcggcaaagacggtgtcccaggcccgcagcgcaattcacaatatccttcgtggcagcgacgatcgcctgctggtggtgattggtccttgctccatccatgatacccaagccgccaaagagtacgcggggcgcctgctggcgctgcgtgaagaactgagcggcgagctggaagtggtgatgcgtgtgtacttcgaaaaaccgcgcaccaccgtgggctggaaaggcctgatcaacgatccgcagatggacaacagcttcaacatcaacgacggcctgcgcctggcgcgcaagctgctggtggagatcaacgacagcggcctgccggccgccggcgaattcctcgacatgatcacgccgcagtacctggcggatctgatgagctggggcgccatcggcgcgcgcaccacggaatcgcaggtgcaccgcgagctggcctccggcctctcgtgcccggtcggtttcaagaacggtaccgacggcaccatcaaggtggcgatcgacgccatcaacgccgccggcgcgccgcactgcttcctgtcggtgaccaagtggggccactcggcgatcgttaataccagcggcaacggcgactgccacattatcctgcgcggcggcaaagagccgaactacagcgcggcgcacgtgaaggacgtcaaagccggcctgagcaaagccgggctgccggcgcaggtgatgatcgacttcagccacgccaacagcagcaaacagttcaaaaaacagctggacgtgagcgccgatgtttgcgggcaaattggcggcggtgaaaaagcgatcatcggcgtgatgatcgaaagccacctggtggaaggcaaccagaacctcgaaagcggcgaaccgctggtttacggcaagagcgtgaccgacggctgcatcggctggcaggacaccgaaaccgtgctgcgcgatctggcggcggcggtaaaagcgcgccgcggataaccgcaaacaatgaaaagggcccgatagcgggcccttgttttatccttgtcattgcacttctctgtattccacgactttaaggcttacagttaatgggccaattaagtctttaagcgacccccttcgcattattcctatttaagaaaagaataattgtcactgctcgcggcattgtgcttatataagacgctttttttattccataaaccccgcaggcctaataagtggggagtggtatgaccttattcctttcaggatgaaagaattatgacaaacaatacctcgcagccgctggggctgcaccggattaaattccatgggaaaggtggtgagtacttcgctatttggttagtcaatgcattattgaccgccctgaccctgggcatctattccgcctgggcgacggtgcgccgtcgccgctatttttacggcaacacggaattggacggcgatcgtttcgactaccatgcacaaccgctgcaaattctgaaagggcggctgttggtgatcggcggcatcatcgtgttttatatcttgctggcgataacgccactgttggggctgctggctttgctggtgttgcttgccctgctgccgtggatcgttatccgcagctggcgctacaatgcgattatgtcgagctatcgcggcgtgcgttttaattatgtctgccgcaccgggcgcgcctattgggctttactgttctgcccgttattgctgattatcgggctgtatgtcggtctgatcatcttgctcggcattggcagcggtcttggcagcatcaacgccatcgcttttatgctggtgctgacgttgattttggccgtgccggcatttgcggcggtaaatggtattattagcgcactgcagcatgatttgtacgttaataacctgttcttcgggcgcacaccgtttattgccgaactgaagaaatcggcctttatcaaatttgccttgatcggcctgctcatattcctgccatttatgttggtcgcgttggtgtgcatcggttcgttcttctttactctctatcagatggtgttgatgggtctgttgaccaacgaagccattgatgtgctggtgctggacaatatcagcagccttctgctgatgatggtggtgctgttgatcggcgcgctggtggccagcagctaccaggtcgttgcccagcgcaattatctgtttaaccaggcaaggctgaacggcgacatcaagctgcattcctcaatgaaaacgctgccatacatgggattgttgatcaccaataccctgattaccctgttctcgctcggtttggcgacgccggtggcggaagtgcgtcatgcccgttatctggcggcctgcacggcggttgaaggcgatctggcgctgctggacattacggcgcatcaagaaagcgccaacagcgcggtggccgaagaagcgctgcaggcgctggatctgggcggcaacttctgaggcgccgatgatccttgaaggcgcttatcagttgccgggacgggccgcacgtgaggcggctcgtctgctggtgaacgaaagcggcgaaggcgtgacgttgcagcggcaggatgaacagcgttacatcccgctgacggacatcaccgtttctgccgcgctgggcaatattccgctgacgctcaccttcaagggcggcgggcgctttgtacctgacgacgacgcggcctttcgccgctggttctatcagcgccgttcgccagggtgggtgcatcgtctggaacgccataaacgcggcgtcgccctggcgctgctgatgacgctgctggcggtagtggcttacgtttacgtggtgctgccgtgggcgagcagcgagatcgccatgcgcatccccacctcggtggaacagacgctgggcaaacatacgcagacgtttttggaccagagcggcttcgcgccctctgcactgccggccgagcggcaacgggcgttgcagcagctattccggcaggtgatgccggccgagatgcgccaggagcgcacgccgctctcgctgaagctgatggcggcgcccggtgcgccgaacgcctttatgttgcccgacggcacgctggtgctcagcgatagcctggtcaccttgtcaaaaaacgacgatggcctggcggcggtgatgctgcatgagatggggcatcacgctcatcgtcacccgatgcgcatgttggtgcgttcgtcactggtggcgttgacgctgatgtggatgacgggtgacgtcagcggcatcggcgatacgctgctgcagtctgcgtccttcgtgaatgagatgcagttttctcgcgggatggagcgtgaggcggatgcgtttgcgatagcggaaatgcagcgccaggggcgttcgctggcggaaatggcggcgatctaccgcgcgttggcgcaggcacctgaacgagaaaagaccgatgactgggcgctgcctgcctggctcagcacccatccggcgatgcaggaacggctggacgcggtgaatgaggcgatggcgcagcagcaataaaaaagcccccggtgaaaaccgggggctttttcgtgaacgggcgaaattacttcgctttaccctggttcgctacggccgccgcttttgctgcgatctcgtcggcgttacccaggtagtaacgtttggttggcttgaagttctcgtcgaactcatacaccaacggcacgccggttgggatgttcagctcgaggatttcatcttcgctcaggttatccaggtatttcaccagcgcgcgcagggagttgccgtgcgccgcaacgatcacgcgctcgccgctcttgatgcgtggcaggatctcttcgtcccagtaagggataacgcgatcgatggtcagcgccaggctttcggtcagcggcagctcttgctcggtcagcgaagcgtagcgcggatcgtggccagggtaacgttcgtcttctttggtcagctcaggtggggtcaccgcgaagccgcgacgccattgtttcacctgctcgtcgccgtatttttccgcggtttccgctttgttcagaccctgcagcgcgccgtagtgacgttcgttcagcttccaggatttttcggttggcaaccaggcctgatccagctcgtcgaggatgttccacagggtgtggatcgcgcgcttcagtacggaggtgtaagcgaagtcgaaagtgaaaccttcttctttcaacagcttgcctgctgctttcgcttcggtgcggcccttgtcggacagatcaacatcataccaaccggtgaagcggttttcttggttccactggctttcgccgtgacgcaccagaaccagcttagttacagccatagcttaactccttaataatctgacatttcaatgataacgaaaatcattatattgccgcgggccggggctcggcaatcgatagtgtctaaccatagccaatttcttgccgcaaagtaagggctggcgaaaggaaaaagctgaatcgttcaggctgaggcggaagggggagaaacggcacgtcggaatcgctccggacgcgccgtggcgtagggaaaatcaggcagattttttcaggcagttgctcatgaaggttttacgcgcgtcgcccttcagatccttggtcttggcgtcggcattgcagcttttcattttctgctgctgcggcgtcagggttttgccggacgcagcggcgccttcggacttcaggcaggtgctcataaaggtggagcgatcggcgcctttcagcgacttggtggatgcctgctggttgcaatcggtcatgcgtttctgttgggccgcctgcgccggcgaaggcgttttcgtcgccgtcgtcgcgtcggccgccatcagattggtgctcagtattaagcccgccagcaatggaagtgcagtaatcagacgcataggtgttccttcagctattgattggccgccatcggccgaaaattgtgacgttgcacaaggcgttgtgcttatcacggtagcctgagtgtagtgcgcgctttggaataagggaaggtgggcgccggtggggggatggcgctaaaaggtaagcatttataacaaattgcccccggccgcacggcgaggggcgtagcgggtcagataggataaaactgataatgcgtggcgctgcggtagcggctccccggttgcagccaacaatccggctgcggccactcggggtggtgcgggctgtccggcaaaaactcgctctccagcgccacgccggcatggttggcgtagctgccgccatcgcgcgccggcgtgccggccagataattgccgctgtagagctgcagcgcaggcgcgtcggtgaacacgctcatttgcacttgcccgtcggcggaccacaaatgcgccgccgggctctccagcgccccgcaggtacgatgcagcagaaaggcgtgatcgtagccttttacccgctgctggtcgcaatcgcgcaggaaatcctgcagcagcgttttcggctggcggaaatccatgccgctgccgtccaccggcgtcagatcggcgcagggaatgccctcggcgtcaacgggcagatagcgatcggcgaacagctgcagccgttgggcgcgggcgtcggtgccggcgccgtccagattgaaataggcgtggttggtcagattgaccgggcaggggcgatcgacctgcgccagatagttgatttccaggcgattatccgaggtcaggcggtaacaaacctgcacgtcgagattgccggggaaaccctgatcgccctccgccgaatgcagcgcatagcagacctgctgcgcatcatgctgcacccggcgccagcggcgggcatgaaaaccgtcgggaccaccgtgcagctgatgggcgccctgattggcggccagcgcatggggtttcccgtcgatgggcagactggcgttggcgatgcggttggcgtaacggccgacggtggcgcccagataggcgccctgacgtgggtagtccgccgggctgtggcaacccagcaacagctcgcgcttttcaccggatttgagcggcaagacggcggacagccaggtggcgccccagtccatcagcgtcaccgtcatgccgtcggcgttttgcagcagtgtcagctggtaaggttgcccatcgggcgccgcttccgtgctcaccgtcagcatgggccggccccctgcgaagcctggcagacatagaaggtttcctgcaatccgccggtttgccgcggatactcgtgcgccacggcggcacgcactgtctccacgagatcctgtggcatcagcgcgacgatgcagccgccaaagccgccgccggtcatgcgcacgccaccgcgcgggccgatcgtcgctttgacgatctcgaccaaccgatcgatcggtggcacggtgatttcaaagtcatcgcgcatcgaggcgtgggattccgccatcagccgccccatgcgctgcaggtcgccggccgccagcgcgtcggccgccgccagcgtgcgggcgttctcgctgatgacgtgccgcgcgcgtttggccaccaacggatccaactgatgttgacgcgctgcaaactgttcggggctaacgtcgcgcagcgccttgacgccgaagaaccgcgccgcttcttcgcactgtgtgcggcgggtgttgtactcgctgtccaccagcccgcgctgcacattggagttgacgatcaccaccgcgacgttgtccggcatcggcaccgcgcgggtctccagcgagcggcagtcgatcagcagagcgctgtcgcgccggccgagcgcggagatcagctggtccatgatgccgcagttgcagccgacgaactggttctccgcctcctggccgttcagcgccagcgccacgccgtccaacggcagctgatagagcgcctgcagcgcctggcccaccgccacttccagcgcggcggaggagctgagccccgcgccctgcggcacattgccggcaatcaccagatccgcgccgccgaaatcggcgttacggcgctgaaggtgcttcaccacgccgcggacatagtcggaccagcgctgatcgggatggctgacgatcggatcgtcgagcgagaattgatcctgctgattctgataatcggcggccagcacgcggatctggcggtcgtcgcgcttggcgcaggcgatgacggtttggtaatcgatggcgcagggcagcacgaagccgtcgttgtaatcggtatgctcgccgatcaggttcacccgccccggcgcctggatggtcaacgccggcgcgtagccgaagtgttcggtaaacagggaatgggtaagcggtttcaggctcatgcttgggctccggcttcacggtaatgaatatcgctgacggcgcacagacgctctgcggcctgttcggcggtcaggtcgcgctgggtttccgccagcatctcgtaaccgaccataaacttgcgcacgctggctgaacgcagcagcggcggatagaaatgggcgtgcagctgccagtgccggttgtcggcaccgttgaacggcgcgccgtgccatcccatcgaataggggaaggaacactggaacaggttgtcgtagcggctggtcagcttcttcagcgccagcgccagatcgcggctttgcgccgcactgagatcggtaatgcgctgcaccgccgctttcggcaacagcagcgtttcaaacggccaggcggcccagtagggcaccaccgccagccagtgttcggtgttcaccacgatgcgctcgcctgcggccagctcgcgctgcgcataatccagcagcagcggggaggcgtgttcccgaaaatagtcgtgctgcaggcgatcttcgcgttcggcctcgttcggcagaaagctgttggcccagacttgcccgtgcgggtgcgggttggagcagcccatcgccgcgcctttgttttcaaacagctgtacccagggatagtgcttgcccagctcatcggtttgcgcctgccaggcggcgaccacctgttccagcgccggcagcgccagttcgggcagggtcttgctgtgatcgggagagaagcagatcacccggctgacgccgcgcgcgctctggctgcgcatcagcggatcctggctatcgggcgccggtggcgtatcgctcatcagcgcggcgaaatcgttggcgaaaacataggtaccgcgataatccggattgcgatcgccggtgacgcgcgcattgcccgggcacaggaaacagtcgggatcgtgcgccggcagcgtttccgtcgggacggcctcttgttggccctgccaggggcgcttggcgcggtgcggtgaaaccagcacccactggccgctgagcgggttgtagcggcggtgcggatgatcgatagggttaaattccgtcatacggttcctttcttggcgccgacgaaagtgtaatcgcttccaattaccgtcttgagacgcccgttgctgaacagggagaggctattgcgcagaaagatagcacgcccgcggcggtaaaaaggtgatctaacgcgaaaaatggaatcgtttacacttcattgaaaagcgcaggaagggcgaagaaaagcgggcgacaacgtgattgagggcattgcggtgaggtgccggtgatagcgttttcacccgaccagccggcagagagggggctctctgccggcttcagccgttaagaatgctggtacagcggataggtgaagaacagcagatgggtcaggttaagcccgaaatggaacagaatcggcacccacaggcggccgctccacatccacgccaggccgtagatcaccccggcgagggtcgcgaagatcaccatcagcgtaccgcccgccagatgcgcggcgccgaataccaaggaggcgacgatcagcgccggccaagcgcccagccactggctgagacgctgttgcaggtagccgcgaaacagcgcttcttcggccatgcagacgaagaacaggtttgccatcacgaaaggcaggatccaggcgggcgcatgcagctcgatttttaaaccgcccagcgcgacggccagcagcaacagcgccggcacggccagcagcagcgcaatccagcccgttttgccggcgttgccgccgcgttcggcggaaaacagcgtgggcaagcaggcgaacagcaggaagggcaccatcgccttatcgaagttgtaatacatggtgaacggcgcgctgagcgggccggctttttcgccgtcgatcatcagctgattgtggatgcccggcaccaggtgcaagaacagcgccacgcagccggcgaccaccagcccttcgagcgcaatcgccagattgcgttgcgcgcgaaaatggtggcgcagccccgccagtgccacgatggccaacaggcaacccaggctgagcggcgtcaataccccatgataaagccccatgcccgccgaggcggccaggatcacccaggctatcagccggttaaacggcaagaaaaataacgaagcagccagtacgccccacataatatgtccctttaaatatgtacacggcgctcagcgcctttgcggcgtgcgatgatggcgaaattgagcgctagagcggatagtagcacaccaagatgacgctaaaggtcggggcagtgatgcatttgtgcatgatgccgacccacacgaccggcggcgatgagggttagcctttcatccatgcctgcgaacgggtgatttcggccaggttttgcaaggtatcgaggctttgctggtggatctcctgcgtgggggccgcgcacaggtcttgcagcacggtcacctggaaaccggcgtcatgcgcctgacgcgcagtgctctcgatggcgagcggcgtgctgacgcccgccagcagcagatggtggcaccgatgttgccgcagccaggctaacaaattgttaccggagaaagcgctgactgccgttttttcaaactgcagatcggtctcttcctgatgcagttcgggcatccagcggcagcccgggccgtttaaccgcagcgcgccgatctgcttgagatggttgaacaacggcgaatggggcggaatgtcatgataatcgtcggcgaatcccacccgcacccaaatcaccgggatttttcgcacccgggcataggccgcggcggcattgacgttggcgagcaggtgggtcgctgccacctgttcgtggcagtggttggcgcgccctttgggcccgatcagatcttcgatcaggtcgatgataatcaacgcagcggacatggcgtctccagaaatggccttcttcctttctatgataaaaggccaaatgtgatgtgctgcggtgaagtgttgccggatatgtttacgccgcgtttcaggcggaggccgcctccagccgttgctgttggtagccgtagccgccctcgccgtcgggcacgaagctgaggcggtgagtgatgcactgcggcgcatcttcggcatggtgcgagacgaacagcagctgggtagcgccctggccgatcagcacgtcgatgaagcggcgcaccagctggcgattgagcggatccagcccctgcagcggctcgtcgaggatcagcagcgccgggtgtttcaccagcgcgcgggcgatcagcgccagccgctgttggccccaggaaaggctgtggaacggggcgtcaccgcgcgcgccgttgagcccgagcagcgccagccattgctctgtcagctgccgctgacgatccgaaaccgcctgataaatgccgatcgaatcgaaaaaccctgacatcaccacgttgcgcacgctggtgttgacgcgataatccagatgcaggctgctgctgacgtagccgatatggcgtttgatttcccagatggtttccccgctgccgcggcggcggccgaatagcgtcagatcgttgctgtagccctgtggatgatcgccggtgatcaagctgagcaatgtggatttgccggcgccgttcgggccgacgatctgccagtgttcgccgggatttacctgccagtcgaggtgattgaggatcggccgatcgttatagctgaccacgccgtcacgcaggacgatcagcggccgatccgccggcagggctactttttgcgtcggatcctcggtttccggcagcgccagcccgttgagattttcgctgtgcgccagctgcgccaccagcgcgtccgccatcacctggctgcgcggcccgcggctggtcagggtgcagtccgccagcacgcccacccgccggacgaaatccgggatttcgtcgaaccggttgagcaccagcaccacggtttggccctgggcggaaagctcgctcagcaacgcggcgagctgcgcgcgggagtgcacgtccagcccgtcgaagggttcgtcgaggatcagcaggtcgggctcgggcatcagcgcccggcacagcagggtcttgcgcgtttcgccggtggagaggtatttgaagcggcgcgtcagcagggcggtgatgccgaactgtgcggccagccgctcacagcgcgcggcgtctttcacctcttcctgaatgatctcagccgcggtgcggccggtgtcgtcttcgtccgcgctgagcagatcggtgttgttgcgttgccactcgtcgctgaccattttttgcagctgttcgaaggagatgcgcaccgcgtgctgaaagtcgctgcggcgctcgccgccgagcagaaccagttcgtcggccagcgcccgcgccagggcggatttgccgctgccgttggcgccgacgaaggcccagctgtcgccggcctggatttccagcgcgtccagcgtcagggtgcgggtatcgcttaagcggaatgaaccttgcgaaatgtgcaacgacgacatcacctgttcctttttttgcaattatttgccttagaaataggcgcattgcagggggatgtcaatcaacaaaaatgcaacgttacgttgcgcttaacacaacgtggcgacaatcacgtggtcggcgttgaacagggcgtgtacggcggcgccgacgctcagttgcagacgctgcagctccgccgtcgtcagcgtggcgcacagggtttcgccccccgccagcgtcaccagcacctcgctgtgttcggcgcctggctgaatgccggccaccacgcccgccagcgcgttatccgcgccggcatgttccgccgtctcgacgcttaaccgcacccacggcgccttgatcagcgccagcacctctttgcccggcgtcagctgcagccggtcggcgctttgctgggtaatggccgccgtcaggcgagtgctgccgtcgttcaataaaatcgccaggtgctgctgcacctgctgatgatcgcgttcgatgacggtaccgaagaactgattgcgcgcgctggtttgcagcgagaagcgcgagatggccgccagcaggctgtcgagcggcagatcgtcctgctgcaacacgtcgaaggccttttgctgcacctggcccagcaggtcatacagctggatcagccgctggccatagcgcgtcagctgtgcgccgccgccgcctttcccgccggtggcgcggtccaccaccgtttgttccgccagctggttcatctcattgatggcatcccaggcgcttttgtagctgatgcccgccagcttggcgccctggctgatggagccggtgtgctgcacctgtttcagcagcgcgatgcggcgcggatcggcgaacagcttttgctggagtttgagagtcagaagaatttcggcctgcatagcgcatcctgtcggcggcaaaaatcttattgtcgccgatttggcggcaaagcgccaaacgcagtgcgctggagagcggggtaataaagactggtattgttttgttgttataatataacataacagaaaaacgataaggctttacgccggctgcggccggtttttatttcaccacagggatgctccacatgagtacgacacgccggcgctttcgcgcgcccagaaaatctttatgcctggccgccgcctgggtcggtggcgcactgacggcgccgctggctttcgccgccgactgcgataaagcccgcaatgccacgggatgcgaagaacatctcaccgtggaggcggcggcccccgccgggcgctacgatgcgttgaacgccgtgagccgcagcgcgtcacagctcgggctgaccgctcgggagacgccgcgcagcatcgatatcatcagcgcgcgggcgatccaacagcggggcgatcgctcgctggctgccgccgtcgagcgcgccaccggtctgtccggcgtcgcttcgccaacgttgtccaacaacttttccgcgcgcggtttccggccgatcgcctggctgtataacggcgtagaaatgcccggcagcacgctgcagctgggcgatctggcgcattacgacagcatcgagatactgcgcgggccgggatcggcgctgaacggcctgagcgcagcgggcggcagcgtcaacctgatctcgcggcggccgaccttcagccgccagccgttcgagctcgattatggcctcggcagctaccgcagccagcgcttgcatctgggagccggcggcgcgctggtggacgatgcggtggcgtatcggctggacgtcagcggcaacgacagcggcagcaacgtgcaggacgagcgcgatcggcagaagcgggtttccggctcgctgctgtttaagctgaccgacgatgcgctgttgacgctgagcctggaccgcatgctcaaccgcaccaacaacccttactacggcacgccgctgctggatgggcgcattgccggcgagctgcgcgacatcaattacaacaacctgaccgacagccgtattcagagcaacgccaccgcatttcaggccggtctggactggtttatgacgcccgaagtggaatggcataaccaattctattactacagcggctttcgcgaatggcgcaacgtcgagcgtttccgcgtcgcggcggcggcccggcccggcgacgtcaaccgcgactctttcggcgccctggcgcacgacgacgatctgatcggcaaccgcagttcgctggtgttcgatcgcgccattgccggtttcgataaccggttgctggtcggcttcgacctgagcaagcggcattttcagtactactccaacggtttccccggttccgaagacgtgccgctcggcgcgccgcccagagagccgttcgcgcagggcaccgatcgccaacgcgcgccggtgcgccacgtcacccagaatcagtacgccgcctttcttgaagatcgcttcagcctgaccgagcgtttagcgttgctgggccagttgcgctacaaccatatggacatggactggcgcttccaggggccgcaggaagagagccgcgcgcgcacctacgttttcagcacctggagcctgggccccagctatgcattgaccgataacctcacgctctacgccaactacaccaccggccaggagccgggcaacgatctgttcttcctaagcccggcgcagatcgatctgccgctgacgcgagcgcgccagtgggaggccggcgccaaagggcagttttggggtaacaagggcgaggcgacgctggcgctgtacgaactgcgcaaggacaacctgtttgtgcccgacgcgcagcggccggatgcgttgaacgcggtaggcaggcagacgtcgcgcggcatcgagcttggcgtggtgctgcgtcccgacgagcgctgggagctggccggcaacgccgcctacacgcacgcccgctacgacgactatcgcggcggtagcccgctgcgcagctacaacggcaatcgcccggcctatatcccggactggaccgccaacctcagcgtgcattatcaggcgacggaacgtttggggctggcttcttcgctgcgctacgtcggcagcagttacaacgacgatgccaaccggcgcaagatgcgcgcgtacaccacgcttgatctggcggcggactatcagctgacgccgatcgtcgatgtcggtttccgcattcgcaacgccaccaaccagctgtacgcctatcagcgcacctacccggatcaggcgctgattgcgccgccgcgcagctatgaaaccttcgtgtcggtcaggttctgacggcgtgaaacattcgttttactcgctgctgtatgccctgggcttgatgtggggcgtctcgctgcccgccaatgccgtcagcctgcacaattgcggggcaatgcgcgattacccgcagccgccgcagcgggtgctggtctacgccaatccggcgctggaaaacctgctggcgctggggctggccggccgtgcgatcggcgtggtcgggtatgaccgcgcgcgcgatcccgcgccgacggcgccggccgaggcgctgcgggcgcctgccagcccggcgccgcccacggcggaagcgttgctgctgatgcggccggattttgtctattcggccagttattactggctgcacagcccggaaacgcccgatcgggcgcggctggcggaatggggcatcggcacttatctctctcccggcgcctgcagcggccagcaaagcgcgatcgctgccgcgctgacgttcgaagacattttcaccgagctgcgggagctggcgcgtatcttcaacgtcagccgcgccggtgaagcgctgatcgaacggctgcgcgggcagttgaggacgcttgagccgcagcgcgcacagctgccgcattggcggctgctgtggtggtatgccggcgcgcagacgccctatgtggccggctgctgcggcgcgccaggcttgctgagccgcagcgttggcagcgagaacctgttcggcgatctgcccgagctgtggccgacggtatcctgggaggttattgccgcccgcgatccggatgcgatcgtgcttggcgatctgccgcgcggcggcttcggggacagcgcggccgacaagatcgcctttctggagcatcacccgctgaccgcgacgctgcgcgccgtgcgtcagcggcgctacgtgatcctccccggttacgacatggacccttccgcccgcaccgtggcggcgctgggccgtttgattcggggcctggcggccttgtcgccgcaggctccgacgctttccaacaaggaaccttgatatgactgccgtttcattctcttcgctgctggactcctgggatcgccagcaggcggcctacatcgccgaacgcgaagcgcgttttaacgcccagctggacgtgctggcgctggccgtcggccaggattttcacgtgctggatctggcctgtggcccgggatcgctgagcctgcgtattttgcagcgctttccgcaggccagggtgaccgccatcgatctcgatccgctgctgctggcggtggcgcgcggcgcgctggcggagtatggcgatcggatccgtatcctgcaggccgatctggcggatccggcctgtttttccgtgctgtccggccctacgccgcaggcggcggtgtccagcacggcgctgcactggctgatgccggagcagcagctggcattgtaccgtaacgtcgccgggctgctggccgccggcggcgtattcctcaatgccgatcatcagcgctgtgatcaccgtcagccgaggttgaaagcgttggcggagcggcacgacgagcagactcaacagcgcgcctgggacagcggagttgaggattgggatcgttggttcgccggcgcgctgcaatcgccggacttggctgcttatcaggccgagcgcgaagcgctgttcgccggccgcccggtaccgccgccgacgccggtggatttccagctcgcggccctcagacaagccggtttcagcgaggcggggacggtatggcagctgttggacgactatgtgattgcaggctggaaatagcatgagccggcggttactgcccggccgtgagggcggctggttgttgctgctggcggcggcgctgccgctggccctgctgggcgccaccttgtcggggcccgcgccgatcgcgtggcgcgacgcctggcgcattgtactcggcgtcagcggcggcgcagcgtccgatgccgaggtgtatcagcgcatcatctggtcgctgcggatgccgcgcgcgctgttggcggcgctggccggcgccgggctggcgttggcgggcaccgtgctgcagtcgctgacccgcaacccgctggccgatccctgggtgctggggatctcctccggcgccggcgtgggggcggtgacggtgttggtgttggggctggggggcggcctgctgtcggtgtccggcggggcgtttatcggcgcgctggcggcgtttgcgttggtgatgctgctggccgggcgttcgctgcagggggagtccacgctgtttattctggccggggtggcggtgacgcagctgctctccgcgctgacttcgctgatcaccctctggcaggcggacgccaacgccacgcgcggcgtgatgttctggctgctgggatcgttcagcgacgcgcgctggccgcaggtcgggctgtgcgggctggcgctggcggcggtgctgctgctttgttggctgcgggcgggcgaactggacgcgctggcgtttggcggcgtgaccgccgcttcgctgggggtggcggtggccccgctgaagctgctgctgtatgtggcgaccaccgcgctgacggcggcgatcgtcgcgttcagcggcgcggtggggtttatcgggctgacggtgccgcacgtcgcccggcggctggtcggttcgcggcatcggctgctgttgccggccagcgcgctgtgcggcgccctgttcgccgtggcggcggacacgctggccagaacgctgtttgccccgcgcgagctgccggtcggggtgctgaccgcactgctgggggtgccggtattcctgctgttgctgtatcggaaggtcaatgcatgacgattgaaaaagcgcgatccggcctgtgcgccgaggcggtgagctggcgagcgggcgcacgcacggtgctggaaaatctcagtttctgcgccttgcccggtgaggtcaccggcgtgctcggcgtcaacggcagcggtaaatccacgctgctcaagctgctggccgggctgcagcccgccgccgggggccgcgtttggctggaagggcgcgaaattaccgcgttttccgggcgggagcgcgccaggcgcatcgcctttctcgagcaatccgcccccggcgccttcgcgctgccggtgaaggaggcggtgctgctggggcgcctggcccataccggccgctggcgcggtttcggcgccgaggatcgccgcctcgccgggcaggcgatggagcaagtgggcatcagccacctggccgatcgcgattggcagcggctgtccggcggcgaacggcagcgggtgcatctggcgcgcgcgctggcgcagcaaacgccgtggctgctgctggacgagcccgccaatcatctggatatcgcccatcaacagcagtttatggccttgctgcggcggctgaaactcagcgtggtggtgacgctgcacgatcttaatctggcggcctgttattgcgatcggatcgcgctgctgcagcggggcgggatctgtgcggcgggcgcgccgcggcaggcgctgacgccggagaacattcgcgcggtatacggtgtggaggccaggctggcggcgcccgccggctatgcgccgccgttgatctattaccccgcgccgggatgagggcggctgaaagggcacatttggccgatcacaatttcgcctcgctggctaaaataactccgttttatcgatttttttgggttagaataaccggatatgcggtgaaaggtatttgccgctcaatgggcagttaagcgaggctatcatgttggaattattgaaaagtctgttgttcgccgtggtgatggtgccggtggtgatggcgctcattctcggcctgatctacggttttggcgaagtgttcaacgtcttctccaaagtgggccgttcgaaagaaaaccgcacccagcactgaccgttccccatcccgatacccgccggcattccccggcgggcattcctcaagttatctcacgctttgccgataaaccgcatgacaagctttcgcgcaacgttatattattttttatataacgaagagtgataatgcacgttaacttgcggagaaaaacaatgaaacagcaatggaccaaatgggttggcgggatcgttctggcatcgggcctggtggctcaggcttcggcggcggaaaagatcaccgtgttcgctgccgcgtcgctgaccaacgcgctgcaggacatcgccacccaatatcaaaaaggcaaggacgtgcaggtggtttcctcctttgcgtcgtcctcgacgctggcgcgccaaattgagcagggcgctccggccgatctgtttatctccgccgatcagcagtggatggattacgccatcgacaagcagcagatggtgaaagacacccgttacacgctgctgggcaacgaactggtgctgatcgccgccaagagcgataagcaagacaagatcgccatcgacaagcagaccgactgggccaagctgctcaacggcggccgcctggcggtgggcgatccggatcatgtgccggccggcatctacgctaaggaagcgctggaacacctgggcgcctggagcgcattggagccgaaactggcacgcgccaacaatgtgcgcagcgccatggcgctggtggagcgcggtgaagcgccgctcggcatcgtctacggctccgacgcggtcgccagcgacaaggtgaaagtggtgggcgtgttcccggaagacagccacaaaccggttgaatatccgatggcgatggtgaaagatcgtcaaaatccgacggtcagcgctttctatacctatctgaagagcccggaagcggccgctattttcgaacattatggattcaccccgcgtaaatgattctgagtgagtacgagtggcaggcggttgagctgagcctgaaagtctccggtttggcggtggtctgcagcctgccgttcggcattctgatggcctgggtgctggtgcgttgccgcttccccggcaaggcgctgctggacggcgtcattcacctgccgctggtgctgccgccggtggtggtcggctatttgctgctgatcgccatggggcggcgcggcgttatcggcgagtggctgtacgactggtttggtttcagcttcagtttcagctggcgcggcgccgcgctggcatcggcggtggtggcgtttccgctgatggtgcgcgccatccggctggcgctggaggcggtggatacccggctggagcaggcggcgcgcacgctgggcgccaatccgtggcgggtgtttttcaccatcacgctgccgctgtcgctgcccggcgtcattgtcggtgtggtgctggccttcgcccgttcgctgggggagtttggcgccaccatcaccttcgtctccaacattcccggtgaaacccgcaccattccgctggcgatgtatacgctgattgaaacgccgggggcggaggccgccgccgcgcgtctgtgcgtgatcgccatcgtgctgtcgctggcttcgctgatggtgtccgaatggctggcccgctggggccgcaaacggatgggggtgtaaatgctggagctggatttctcgcagcagctgggcgacctcaatctcaacgtccgcgccgatttgccggcgcagggcatcaccgcgattttcggcctgtccggcgcaggtaaaacttcattgatcaacgccatcggcggcctgacccgtttgcagcaggggcgcatcgcgctcaatggccgcacgctggtggataccgccgcgggcctctgcctgccgccggaaaagcgccgtatcggctatgtgtttcaggatgcgcggctgttcccgcactatcgggtgcgcggcaacctgcaatacggcatggcggccggcatgcgcgcgcagttcaacaccatcgtcgagctgctgggcatcgggccgctgcttaatcggctgccgctgacgctctccggcggtgaaaaacagcgggtggcgatcggccgcgcgctgctgacggcgccggaactgctgctgatggacgaaccgctggcctcgctcgatctgccgcgcaaacgcgagctgctgccgtatctggagcggttggcgcaggacgtgaacattcccatcctctatgtcagccatagcctggacgagatcctgcggctggccgagcaggtgttggtgctggatcgcggtgaggtgcgtgcgttcggcgggctggaagaagtctgggccagcagcgcgctgcggccgtggctgcagcgtgaagatcagagcagcgtgctgcgcgtcagcgtgattgagcatcatcaacgttatgccatgaccgcgctggcgcttggcgatcaaaggctgtgggtcagcggcctcgacgccgaactgggcacccagctgcgcattcgcatcaacgccgccgacgtctcgctggtgctgcagccgccggtcaacagcagtattcgcaacgtcttgccggccaaggtgagcgagtgtctggacgtggacgggcaggtggaagtgaagctggcggtcggggaacacgtgctgtgggcgcgcatcacgccctgggcgcgcgatgaactggcgatccgccccgggcagtggctgtatgcgcaggtgaagagcgtgtctatcagccgcgagagccgctaagacaggccctcccggcgggagggcgaaaagattacagcacgcgggtgcggatcacctcggcgatgcccggctgcaggttatcggcgatcaccagatcggcgcgttccttgatggcgtcatcggcattgcccatcgccacgcccaacccgaccgcttccagcatgctgatgtcgttgtagttgtcgccgaacgccaccacctgatccatgctcagcccctgcgactctacccattgacgcaggcgtttgcctttgctgttgccgcctttggcgatatccacctgatcgtgccaggaccattcgcacgccagccccagctctttctccaccgtgtcggcaaactcgcgcagcgcggggatatcggcatgcgaggtggcgaatttccagatcgcctgcgcgtcgtcggccgcctgcgtcaggctgccgacctgcagcagcgtcgggcgctgcgccgccggcagggtttcggcccaggccagcgagcgaatcacatggccgctcggttcctgatacagcatggcgtcgtcaacgtacatcagcccgtgaatgtcggtctgtttgagcatctgcagcacctgtttggcctgctccttcgccaagggatcggcggccagcacctttttctgctgaaaatcatacaggtaggtgccgttacagcagatggccggggtatctatctgcagcgcctggtaaaacggatggatggcgacgtggtggcggccggtgaccaccaccacctggacgccggcggcgcgcgcctgcgccagcgcttccagcgactgcggtaagatgcgtttttggttgtccaacagggtgccgtcaagatcgagggcgatgacgcggtagctcatagggttctcgttatcgttagccataaaattaatccgatggtacctcttcgctctgatgcaaacaattcggcctgcctgctatcgccgaccgatgacttatttggacgctgatgagaacagagttttgaacatcggtaccagaagtttgttgccatattcgctaagatggttatcgtcaaaatagatgggccgcccattgtgagttcccgcgcacttgccgtctcggcagaggtaaggaagcggatccaaaatttttacgccacattttttcgccgcttcatcttgagcttgccagacaaaagcatgacgttgtcggtaatctgtttcggagatggatatgtcgggctctgaaccgccaaaactcagcaggcgcgacagtgtttttggcacattgacgagcatttccggcaccggacgcacaacataaatttgccgttctgtagccatttcacacagagtgtcgacgagtgaagttttgaactcggacaaaaatcccggctcaggggtacgatataccttcgaaaaatacaccgagggttggttcagcttcgcgcccgcaatttgctggccgaaggcgtaagcactggttcggttaatcacgactgcggggatattgttgtccagcgtggatagtttttcttttatccactgattgaatgcgctgcactgaatattatcgtcaagcgcgccgggaacaacgttggcaccgaagagcgttgggcagcctgcataagtgagattgagaagcccatcagtttgatttggcagggcggactcgactgcagagatcatcgcatcgccgtggctatcgccaacgatgataacccgaatattttcgcctccatagatacaggatggcgagctgatgccggacttggcgaagcattcatctctgttggcgagcatgttggtactttcgttggcgatcagatcgatttgctgcggtaacctgccggagaaattaacggtaaacagtgtgacacacagcgcagcaaccagcatggtagcgattccgattgtacacactgattgacgcgttgtttgccttgaaagccacttgcgggcagggttttctataagacgaagcgacaactcgccaagcaacacgctggccagtaatcccgcaactacccatttcatctcggattgagcattggtgtagacaagcagcaccgcaatcggccaatgccaaaggtaaatagagtaggatgaaacacccagacgtgcagcgacggggtttgaggtcaagggggaatcctggcggccggcggcaagcaccaacatggcgccgataaccggcaacagggcgttataaccgggccagggtttactggcatcacatcccacgatggctatcgcgatgcatagcatcccaagccattccgtataaatacgtctttttccgctgagcgttcggttttgcgttaaccgccagacgattcctccggcaagcatttcccaggctcgggttgggataagaaaaaacccggcggagggcgcgagggaagacatgatgattgataagccaaaggagaccacgccggctaaaatgatgaagcgcatgaagccgtttttgccccccaatcgccatatcaacataagggccagcggcaggataatatagaactgccattctacggataacgaccaagtatgcagcagccatttttcatgggatgcgctgtcaaaatagccggcctctttccaaaacttcacgttagataggaagagtatggcggtaaaggcgtgttttgccagttgaacataatctggcgtcggcaaccaaaaccagcccagacacagcaaggtcagacaaagcgccagcagggcgggaatgatgcgtctggccctggcaaggtaaaattgccaaagtgaaaagcggccttcctccaggccggtcacgatgatgcgtgtcatcagaaaaccggatatgacgaagaaaatatccacgccaacaaaaccgccggcaaaacccgggatgccgaaatgaaaaagtacgacggcgattactgcccaggctctaagcccgttgatgtcatgtctgaaactctgtgaaaaagaaaacatatctattactcattaaatgtatttttgggttttttaataggcacccataaagtaaaggcgtgcgggcacgctttcccatggtgttattgcaatcgcgattgacgtgtttttttattaatccttcttaattatttttcatgtgtatttatgtatgcggccaaattcattcattaagagaattattaaaggaacatgccatgggtgtaggtggtatgccaaacccgacatggctgttatgtccagtgagacataggcgtgtctgtaccgactgtggacggcaatatgctatatatcgattaattaatgtttgttattttcttaattttatctatgcgtattaattatgataatcgctttggttatttagattaattatgtttttttaatgacgccaggtggttatgtatattgctaatgtaaaggtgactaaccgtgcggcggcaaattctattttaaattttgagcaggccttttaatttatcaataattcgtgagtctgtcttccattctctatgactgctcgtttccgataagaaaatcgcagcagacgctaggatgatggcttttggcattttgaacgtagatgttgtctgggggggaaagtatgtggcttggggatttaagcgtaatgcggtagtgccatgtgacggatgtgcggtaagctaggggcaagcgaacggcctgaaaccggttcctcttttaccctttgcaaggagaacacatgaagcaaatcgtttatgtcgccagcccggagagccagcagatccacgtctggcagttggacgacgccggcgcgctggcgctgctgcaaaccgttgacgtgccgggccaggtgcagccgatgacccttcatccggacaagactcacctgtacgtcggcgtgcgtccggcgttcggtatcgtcagctaccgcatcgaggcggatggcacgttgcagcaggccggcatggcgccgctgccgggcagcccgacccatatctcgaccgatttgcaggggcgttacctgttctccgcctcctacagcggcaactgcgccagcatcagcccgatcggccacgacggcgtggtcacggcgccgatccaacagatcgacggcctgaacgcgccgcactcggcgaacatcgatccgaccaaccagctggtgctggtgccgtgtctgaaagaagaccgcatccgtctgtttaacctgagcctggcgggccagctgacgccgcacgcgcaggacgcggtggatatcgccgccggcgccggcccgcgccatatggcgttccaccacaacgacaagttcgcctactgcgtcaatgagctgaacggcacggtagacgtgctggccatttcggaaaacggcggcaagtacagcgtgacgcaaacgctggacatcatgccgagcgatttcgacggcacccgctgggcggcggacattcatatcacgccgaacggccgcttcctgtataccagcgatcgcaccgccagcattctgaccctcttcagcgtttccgaagacggcggcacgctgagcgtggccggctattatccgaccgaaacgcagccgcgcggtttcaatatcgatcacagcggccgcttcgtgatttcgtccggccagaagtccgatcacatcgcggtgcatgaaattgaccagagcagcggcgagctgaccatgctggcgcgttatccggtgggcaagggcccgatgtgggtgagcgtgctggcgaagtaattcgtcagccagactcgagtggaaagcgcggtgcggttgaccgcgcttttttattggcgggggatcagttgaacatcaccgtcagcgtggcgctgccgagactgtggaaatggacgttgaagcccaccagcgcgccgctggaaccctcatccacgtcaatgcgctccacgtccaacgcatgcacggtgaactgatagcggtggctttcgccattcggcggcgcggcgccgccgtaaccggccgagccgaagtcggtgcgggtttgcagcgcggcgctcggcagcggcgctttgccggagcctgcgccctgcggcagctcacgcacgtcggccggaatattggccaccacccagtgccaccatccggagccggtaggggcatcgggatcgtacagggtgacgacgaagctcttggtgccctcgggcacgccgtcccaggccaggtggggcgacaggttatcgccgtggtagcccatgccgttgaagacctgcgtctgcggcattgtgccgccgtcctgcagatcgttgctgtacaaacgaaaagccataatgactcccagttgcgataaaagcagagcccttaagctagatctttttggtggaacaatacaaccccttgcgccagcggcgggcggttgatctcgacggtaacatgcaccagttcgggatgaactgccaacagttggcgcacccggtcggcggtgagggcgcgatcggcgctgctcagggcgaggacgcaatgatattttcctttaccgatgcggcccaaatgcaaatcggtcagcgtgagtgggtggccggaggtggccagggtctgacgtatctcttgcgccacgggggcgtccatttcggcatccagcaaaatcttcccgctatcgcgcatcaggctataggcccaggtggccaccatcatcgcgccgacgatgcccatcaacggatcgagccaggcggcgccccaaagcttgccgccgaacagcgcgacgagggccaacaccgaggtggcggcgtcggcgatgacgtggatataggcggagcgcaggttgaggtcatgatgatggtcatcgtggtgatcctcgtggtggtgatggtggccgccgccgcgcaacagccaggcgcaaagcagattgacggccagcccgatcgtaccgatggcgatggcttcgttgtaatgaatcgggctgggattcagcagccgctgcgctgactgaaacagcatcagcgctgccaccagcaccaacaacaccgcgctggtgtaaccggccagcacttctatcttccaggtgccgaggctgaagcggcgatccttggccaaccggcgtgcggcgccgtaagccagcagcgacaagcccagagccagcgcatgcgagctcatgtgccagccgtcggccaacaatgccatcgagttaaacaaccagcccccggctatctcgatgaccatcatactggcggtgagtatcaccgcccatctggtgtttctttcggccaatgggttaccatcgtcaaaaacgtggctgtgctcgcggtgcaaagcgggcgcgtgagacgtcatggtgaagttcctcagcaaaaggtagtgtgctgaaatatactataccccagtatagtaaataacaatcaggcggaaataatgagccataccctcagagatcaaaagaagttgttggcgcgggtgcgccgcattaaagggcaggccgaagcgctggagcgcgcgctggagagcggcggcgaatgttctgctgtgctgcagcagatcgcggcggtgcgcggcgcggtcaacggtttaatggcgcaggtgctggaagggcatgtgcgcgaacatctggctgccgcagacgctacgccgcagcagcgcgagcaggacatcgagcaattgatgaccgttttacgttcttatatgaagtaatcatgatttcactgaaaaaacgcacgccgtggttcggctggctgcgccgttgggccaaaggcatcaagcgcgatatctacgcgctgtggctggccgcccgtgataagcgcaccccgtggtacgccaagctgatcgcgttgctggtggccggctatgcgatctcgccaatcgatttgatcccggatttcattccagtgctgggctatctggacgatgtgattatcgtgccgttgggcatcatgctggcggtgcgcctgatccccaaaccgctgatggccgagctgcgcgagaaggcgcaacagcgcgtcgacaaccccaccggccgcatggcggcggcgatgatcattttactctggctgctgtgtctgggattgctggcccgctatctggaccagcattggtaaggcattaacgcgcggcggcggccacggcggcggtcaggcggctgagctgttccgcttcgatgatgtaaggcggcatcaggtaaatcagtttgccgaacggccggatccacaccccgcgctcgacgaacccgcgctgcagctcggcgacatccaccggttcgcgcatctccaccaccccaatagcccccagcacccgcacgtccgccaccttcggcagcgccgccaacggcagcagttcttgcttcagctgggcttcgatggcgctcacctgcgcctgccagcgattttccgccagcagcgccaggctggcgtccgctaccgcgcaggccagcgggttgcccataaaggtcggcccgtgcataaagcagccggccgcgccgttgctgatggtctccgccacgtggcgggtggtcagggtggcggacagggtcatgtaaccgccggtcagcgccttgcccagacagagaatgtccggcaccacctgcgcgtgttcgcaggcgaacagcttgccggtgcggccgaagccggtggcgatctcgtcggcgatcagcagcacctgatgacgatcgcacagctcgcgcacccgcttgaggtaggttgggtggtagatgcgcatgccgccggcgccttgcaccaccggttccaggatcaccgccgccacttcaccggcgtgctgctccagcagcgcggcgaacggcgcaatgtcttcttcgcgccatttctcgtcgaagcggcactgcggcgcggtggcgaacagatgcggcgccagatagccctgatagaggctgtgcatcgagttgtccggatcgcagaccgacatcgcgccgaaggtatcgccgtgatagccatggcgcagcgtcaggatgcgctgccggcgctcgccgcgcgcctgccagtactgcagcgccatcttcagcgacacttccaccgccaccgaaccggaatctgctaggaacacgcactgcagcgcttccggcgtcatctccaccagccgacggcacagcgagatggcggccggatgggtgatgccgccgaacatcacgtgcgacatcttctccaactgctggctggcggcctgattcagactcggatggttgtaaccgtggatcgccgcccaccaggaggacatgccgtccaccaggcgccggccatccgccagctgcagctcgacgccgctggccgactcgatcgggtaacagggtaacgggcggctcatggaggtataggggtgccagatatgacgttggtcaaacgccaggtcggaagcggtgacagacatacttgtaaaccaaattgaattaagattggttgacagtatatccacaatatttaaactggcgacactttttcgttttggagacgccatgatggccgaccgcattcactggacagtagggcaagcccaggccctgtttgataaaccgctgctggaactgctgttcgaagcgcaaaccgtacaccgtcagcacttcgacccgcgtcaggtgcaggtcagcacgctgctctcgatcaagaccggcgcttgcccggaagactgcaaatactgcccgcaaagctcgcgctacaagaccggcctggagtcggagcggttgatgcaggtcgagcaggtgctggaatcggcgcgcaaggccaaggcgaacggctcgacccgtttttgcatgggcgcggcgtggaagaacccgcacgagcgcgatatgccttatctgcagcagatggtgcagggcgtgaaagcgatgggcatggaaacctgcatgacgctgggcacattggatggcacccaggccgagcggctggcggaggccgggctggattactacaaccataacctcgacacctcgccggagttctacggcaacatcatcaccacccgcagctaccaggaacgtttagatacgctcgacaaggtgcgcgacgccggcatcaaagtgtgctccggcggcatcgtcgggctgggtgaaacggtgcgcgaccgcgccgggctgctggtgcagctagccaatctgccgaaaccgccggagagcgtgccgatcaacatgttggtgaaggtgaaaggcacgccgctggcggataacgatgacgtcgatccgttcgatttcatccgtactatcgcggtggcgcgcatcatgatgccgtcttcttatgttcgcctctccgccggccgtgaacagatgaacgaacagacgcaggcgatgtgcttcatggccggcgccaactccatcttctacggctgcaagctgctgaccacgccgaatccggaagaagacaaagacctgcagctgttccgcaagctggggctcaacccgcagcagaccgcaaccgaacacggcgacaaccagcaacagcaggtgctggccaagcaactgctgaacgccgataccgccgagttttacaacgcggcgccgtgatgagctggccacaacgcatcgagcaggcgctggcggaacggcgcctcaacgccgcctaccgtcgccgacaggccaccgagggcggcaacggccgccagatccggcttggcgatcgtctctacctgaacttctccggtaacgactacctggggctgagccaggatgcgcgggtgatcgccgcctggcagcagggcgcgcagcgttacggcgtcggcagcggcggttcgggccacgtcaccggctttagcgcggcgcatcaggcgctggaagagcaactggcgacgtggctcggctatccgcgcgcgctgctgttcatctccggttacgccgccaaccaggcggtgctggcggcgttgatgcagaagggcgatcgcattttggccgatcgcctcagccatgcctcgctgctggaggcggcggctcagtcgccggccgagctgcgccgcttccagcacaatcagccgcaggcgctggcggatctgctggccaaaccctgcgacgggcagcggctggcggtgaccgaaggggtgttcagcatggacggcgacggcgcaccgttggcggagctgcatcgcctaacccgcgcggcgggcgcctggctgatggtggacgatgcccacggcgtcggcgtgcgcggcgagcaaggccgcggcagctgctggcagcagggcgtgcgtcctgaactgctggtggcgaccttcggcaaggcgttcggcgtcagcggcgcggcagtgctgtgcgatgaggcgaccgccgagtatctgctgcagttcgctcgccatctgatctacagcaccgcgatgccgccggcgcaggcctgcgcactgcaggcggcgctggcctgcattcgagagggcgatgaactgcgcgcccggctgcaggacaacatccggcgtttccgccagggcgcggcgccgctggcgcttaccctgacggattccgacaccgccatccagccgctgctggtgggggacaatcagcgtgcgctcgatctggcgacccgtctgcgcgatcgcggcctgtgggtgagcgccatccgtccgccgacggtaccgccgggcggcgcgcggctgcgcattaccctgacggcggcgcaccagccgcaggatatcgatcgcctgctggaggtattgcatgacgtcagccaatgacacagtgaacaaacaggcggtcgcctcggccttcagccgcgcggccggcagctacgacgccgccgccgcgctgcagcgtgacgttggcgagcgcttactggggatggggagttcccacccgggcgaacggctgctggatgccggctgcggcaccggctatttcagccgtctgtggcgtgagcgaggcaagcaggtgacggcgctcgatctggcgccggggatgttggcattcgcccgtcagcaacaggcggcgcaccattatctgctgggcgatatcgagcaggtgccgttgcccgacgcggcgatggacatctgtttcagcagcctggtggtgcagtggtgcagcgatctgcccgccgcgctggcagagctgtatcgcgtcacccggcccggcggcgtgatcctgttctccacgctggcggcgggctcgctgcaggaattgggggacgcctggcaacaggtggacggcgaacgtcacgtgaacgccttcctgccgctggcgcagatccgcgccgcctgtgccgactatcgacacgagctggtgacggagctgcgcaccctgaattacccggacgtgatgacgctgatgcgttcgctcaagggcatcggggcgacgcatctgcaccagggacgcgagggcggcctgatgtcacgcggccgcctcgccgcgctgcaggcggcttacccgtgccggcaggggcagttcccgctcagctatcatctggcttatggagtgatttatcgtgattaaacgttggttcgtgaccggcaccgacaccgaggtcgggaaaactgtcgccagcagcgccttgctgcaggccgccaatctggcgggctaccgcagcgccggctataagccggtggcttccggcagcgagatgaccgccgaggggctgcgcaacggcgacgcgctggcgctgcaagccaacagcggcgtggcgctggggtacgacgaagtgaacccttacgtttttgccgaaccgacttcgccgcatatcgttagcgccgatgaaggccggccgatcgacgcagcgcggctgtccgacggcctgcgccggctggaacagcgcgccgactgggtattggtcgagggcgccggcgggtggtttactccgctgtcggcgcagtacaccttcgccgactgggtgcagcaggagcaactgccggtgatcctggtggtgggtatcaagctgggctgcatcaaccacgcggtgctgacggcccaggcggtgcaacaggcggggctgacgctggccggttggatcgccaacgacgtggcgctgccggggcggcggcatcaggaatacctggccacgctgcgccgcatgctgccggcgccgctgctgggcgaaatcccgcacctgccgcaggccgaacgagcgccgttggggcaatatctggatatcagcctgctggcgcagtgagaggttctggctgatgaatcataacgccgggtcttatgacccggcgttggcttttacatggcggtaatacaggcgttatcgagataaagcacgccatttttcgccagggcaaacaggttgaacgtcaggatgacatgggtcgcccagaccgggacttttcgtcgattggcgttgaaacgatattcggtgtactcggcgtaagcatcggctttcaaggcggcgtcccaggctgccggcgcggctttggctacgagcgagacgccgttgtccgcatgttcctggatacaggcatattgcagcgtcgcgaacagattgccggtaccgccgttgaccgttttcagggtaaaacaggcgcccaactgctcatattgcgcggcgggcacgatcactctcacccctgcgttggtattggcgttgcccaacttggtcactttcagggcattactgccgttgacgcccgcgccggcttcgatactgatagtcactgcgtctgaggtaaagggctcgctgatcgtgccgcctgttacttcccagccaaacggcttagcggaaaaggcgaactcaccgtcttttaacttgttattcacggcgccgaccagcgtctggatcccggcgccacccccaccgccatccagtcggctattgacgatgacaaagtcgccggtaccgctgaaatagcggccgctggcggttcttacgccatagaacttcacgctgtcgacgataatcccgctactgccggcctcggcgtaaaacagcgacgcttgcgccagtcggccgccggcgacgatgatttcgccgccgtgaatcaacagcgatgcattttgattggcgctgcaacggaagggaatttccgtaagcggactattaccgttgttgaattccatatggcagccatgcaattcaatgctaccggcctcaacgtcggcgatcgagccggcatagtcgatcgaagtgccgaacaggcggaaggcgccgttggggttagcgttgcgaacggccaacccctgggaattgccgagggtgccaccgaagaagttgatgccttcgccgaagttttgggcgccgctgttcgttgaaggcatatgcaggcactcaaaacagcgaatgacttcacaggcgtagtggtgggcgatataggcattggtgccgtagtacaggccgtagtagaagccggaaatatagacgttattgacggaaaagttgcccagcgggccttcaggcgaatcgaaacggacgccgtcgatataggtgtattcgatcgtcgtttcatctttgctgttgttaatcttggcgccgatgccctttacggtgaaatctttcatgataggtgccgggcgaataggaacgttgttatccagcgcgccgctgctggtatagcagcgcaggaaatagttatggtcgctttccgtgccgttggggatctcggtagtgatgttgacgccgttgccgtcgatatagacgaacccgacattgatatcggttttaggcgccgaccaaagggcaaaaggcgcggcgaatctgacaatcgcaggacgttttaacgttttgatgataaagtcttgtgcgccgaccagttcgtcgcgcgaactgacgtaaatgccttcaatattaagacgttcctgcagattccagtttttgttgcgcaaatccgcgtattgaataaatgccgcgttgttgtctgtcatgcttacatccctcgatattatggtgtcggtgtgacccctatcgagtatgaaaagacggcgggcccgtgcctattgggcgcagaccggccgtggctgatacaacagcaacctaatcgctaacccgaccactcactccgccagcccggcgccgatcagcgcctcatccaactgcgtcagcgcgccgtgcgccacagtgcgcccgctatcgagcagacaaaagcggtccgccacccggcgcacgaacggcaactgatgctctaccagcaaaatggtcatgcccaattcatagttgagcctgcggatcacgttgccgatgtcggcggcgatcgaaggcggcacgcccgccgtgggttcgtcgaggatcagcagcgccggttcctgcgccaacgcacggccgatggccaactggcgttgggcgccttcgcacagatcgccggcgcggcgggtacgcatctggcgcaaattgggaaacaggctgtagatcagcggcggaatgcggcgaggggcgccgcgcacggccatctgcgccacctgcagattctcttccacgctcagctgcgagaagagttgccgcccttgcgggacgtggctgatgccgagtgcggcgcggcgctccatcggttgcagcagcaggttttgcggcggctgatctgccggctgccaggtcatgctgccgctcactaccggcaaatgccccatgatgcagttgaccagcgtggtcttgcccacgccgttgcgcccgagcagcacggtgcactggccgcgcggcagctccaggttgatgtcccacagggtgtggttttgaccgtagaattgattgaccgatctcaggctcagcatttggcattctcctcatagacgctcgtttcactcgttggcgggggacagcaaaggccgcatgcgcggcgaatttcccgagtgtggcaatgtctggaacaagatgccgtccgtccgatgagccagagcaaggtctacggtggacggaatgacagtcaatatgttgttaaaaacgacgcttgtgacgacttggtgtcgttcttgcgcttttacaggcgatcgcaccgcgaggggtacacgctgtggctggcagcgcatcacgccgccgcaccgcattgatacgcaggaagataaagcaactctcaggccagttttaccgccgggtgaaaacggggattgttatcgccttgttaaccgctaatcaggcctgacgcgctctgccgcggcggcctgaaaatacgcggggaagttaacccggacgttttttgcactcttgtggtgctctgcggtgagggcgtggtgcaaggcattgcgccgccgtcaagcgcgatccgcgagaaaggggccgatgcgattttggcaatggggatttttagtattaatcggcataaacaaagcgatatttttatgaaaaaataactaaaaaagccattttggcgagtgtaaagggcgaaaagctttctttctgtaactcccgccccgggcggggcggtgagagttatccactattcctgtggataaccttgtgcattagatttagaaaaacgctgtaaagcgagagccgacgcgggttctgttcgctttgcccgcattctcgtctttttattaaatatcttatatatcaatagattaattaaaatcaagacacaggggtattgatcaggtctctatgtatgatttttcgacgcggtgctatcaataagttaattcgcggcaagttctggggataaatctgttattgacaataaaaatgtcacccggctgtaacctcacggtgcaacggcatcgccgccgtgccgggcgcagcgacgaatccgcttgaagctggttttatatccagtatcatgggcactggcgcaaatcgccgacactttccataattaggggccatgtccggcgcagagccggctggccgcctgagcgcgcgcatctccacagggtagccgagcaatgagtaaacttttcaaactgcattccgagttcaaaccggccggcgatcagccggaagccatccgcaagctggaagaggggctggaagacggcctggcgcaccagacgctgctgggggtcaccggttcgggcaagacattcaccatcgccaacgtgatagccgatctgaatcggccgaccatggtgctggcgccgaacaagacgctggcggcgcagctgtacggcgagatgaaagcgtttttccctgagaatgcggtggaatacttcgtctcctactacgactactaccagccggaagcctacgtgcccagctccgacaccttcattgaaaaagacgcttcggtgaacgagcacatcgagcagatgcgtctttccgccaccaaggcgttgctggagcggcgcgacgtggtggtggtggcgtcggtgtcggcgatctacggtctgggcgatccggatctttacctgaagatgatgctgcacctgacccaggggatgatcatcgatcagcgctccattttgcgccgcctggcggagctgcagtattcccgcaacgatcaggctttccagcgcgccaccttccgcgtgcgcggcgaggtgatcgacatcttcccggcggaatcggacgagctggcgctgcgcgtcgagctgttcgacgaagaagtggaacggctgtcgctgttcgatccgctgaccgggcagattgagcaggtggtgccgcgttttaccatttacccgaagtcgcactacgtgacgccgcgcgagcggatcatgcaggcgatggaagagatcaaggtcgatctggcggaccgccgcaaggtgctgctggccaacaacaagctgctggaagagcaacgcctgacgcagcgcacccagttcgatctggagatgatgaacgagctgggctactgctcgggcatcgaaaactactcgcgctacctttccgggcgtgccgagggcgagccgccgccgacgctgttcgactacctgccggcggacggcctgctggtggtcgacgaatcccacgtcaccattccgcagatcggcgcgatgttcaaaggcgaccgcgcgcgcaaggaaacgctggtggagtacggcttccgtctgccgtcggcgctggacaaccgcccgctgcgcttcgaggagttcgaggcgctggcgccgcagaccatctatgtttccgccacgccgggcaaatatgagctggagaaatccggcggcgatctgatcgatcaggtggtgaggccgaccgggctgctggatccgatcgtggaagtgcggccggtcgctactcaggtggacgatctgctctccgagatccgcaagcgcgcggcgatcaacgagcgcgtgctggtgaccaccctgaccaaacgcatggcggaagacctgaccgaatacctggaagagcatggcgagcgcgtgcgctacctgcactcggatatcgataccgtggagcgggtcgaaatcatccgtgacctgcgtctgggcgagtttgacgtgctggtgggcatcaacctgctgcgtgagggcctcgacatgcctgaggtgtcgctggtggcgattctggacgccgacaaggaaggcttcctgcgttccgagcgttcactgatccagaccatcggccgcgcggcgcgtaacctgaacggcaaggcgatcctgtatggcgatcgcatcaccgattcgatggccaaggcgatcggtgaaaccgagcggcgccgcgccaagcagcaggcctataacgaagccaacggcatcgtgccgcaggggctgaacaagaagatcggcgatattctgcagatcggtcagccggtcaaccgcgccaaggggaaaggcaggagcaaggcggcggacggtggcgctcagctgcagaacctcacgccgaaagcgctggatcagaaaatccgcgatctggaggcgcagatgtacacccatgcgcagaacctggagttcgagcaggcggctgcgctgcgcgacgaaatccaccagctgcgcgagcagttcatcgcgatttcctgaccgttggacggcgcccgcgctgtgggcgtcaaaattccttgtcggccgcgtcaaagctgttatggtgtgcggcccgatttgaccacgaagagtaccgaacatgagccaacaccagtctaaagacccgctgcacggcgtgacgctggagcaactgctgaataaactggtggatcactacggttggtccgaactgggcgcgcgcattcgcatcaactgtttccgcagcgatccgagcatcaagtccagtctgaagtttttgcgtcgcacgccctgggcgcgcaaagaggtggaagatctgtatatcgatatggtcagccatcccgccccggccagcgataacccctggctgcgcgggcgcgacggctaaattcggtcagcggcgggcagccagctccaccagcgcgtgatccagcgcctggcgcagcagctggcgatcgtggcggtaggggatgtcgctcgcttccagcggctgttgaatcaccacccgatcctgcacttcactggtgtccaccgccgggccgacaatcagcgcatcgatcatccggcggccgatcttctcttccatcagcgttagcttatcctttaacgacagtgccgcggcggccacgctcagttcgcggccgaggttgccgatatagatcatgctggcgctgctgcggcgcagcgcctgggtgagatcgtccagcagcagcagcggcatcaggctggtgaggaaactgcccggcccgatcaggatcacgtcggcttgcgcgatggcgtccagcgcttcgcgcgtggcgttgaccgggggcgacagcatcagctcctgcggcataagagtcagttggtcaacattcacttcaccgtaaacatggttgccttcgtgatcgtgcgccatcaaatccaccggctgctccgacatcgggatcagcgccgcgtccaccttcagcaggctgcgcaccaggttgatcgcttccagcgggcgcacgctcaggtgatccagcgctttcaacatcaggttgcccaggttatggccggccagttcgccgttgccgctgaagcggtattcgaacatcgccgaggcgacgctcggctcggtgatcagctggttgaggcagttgcgggtatcgccccaggcaatgccgccttccgaacggcggatgcggccggtggaaccgccgttgtcggtggtggtgacgatgccggtcaggcgggagcctaaggacgacagggccgacatcacacggcccagaccgtgtccgccgcccaacgccaccacgcggtcgagatcggccagggtacgattacgcataaatttccttacaaaggggctgaactgcccgcataaggtagcggatccggcataaaaacgcgataaagagtgtcatttgcgtgattctggtcaattcgtccacgcaagcgatgtttatcatggtttacccgaatagacggcgtctaaaaacgctgtatagacaattatatagcgaattaacgcgttggctatcgttgccgattagcgctagaattctgctgaaaaccacggtttcattccggctactcaaggtagcgggaagagaaatcaaactcctagcccctgcgcctacgttgttcatccggaacgatatggcgcctgggccgtggcgaagtcagccaccagggtgcagaggggaaacgctcgcatctcccgactttggaaaggtgttatggtaccgcaactcattgatgcttatgagcgcaagttctattacctgcgcttgtcgatcaccgacgtgtgtaactttcgttgcacctattgtctgcccgatggctacaagccgagcggcagcccgaaaagcttcctgtcgctggatgaaatccgccgcgtcagccgcgcgttcgccgaactgggcaccgaaaaggtgcgcctgaccggcggcgagccttcgctgcgccgtgattttaccgagatcatcgccgccgtgcgggaaaacccggccatccgcacgctggcggtcaccaccaacggctaccgtctggcgcgcgacgtcgccgcctggcgtgacgccggtctgacggcgatcaacgtcagcgtcgacagcctggatccccgtcagtttcacgccatcaccggtcaggacaagttccgccaggtgatggacggcatcgatgccgccttcagcgccggtttcagcaaggtcaaggtcaacgccgtgctgatgcgcgacgtcaatcaccagcagctcggcgcctttctcgcctggatcaaggatcggccgatccagctgcgttttatcgaactgatggaaaccggcgagggcggcgagctgtttcgcaaacaccacgtttccggcgaagtgattcgccggcagctggaacagcagggctggcagcgccaggcgcgcggccgcagcgacggcccggcgcaggtgttcagccacccggactaccagggtgaggtgggtcttatcatgccgtatgaaaaagacttctgcgccagctgcaaccggctgcgcgtttcttccatcggtaatctgcacctgtgcctgttcggcgagcagggggtgcccctgcgcgatctgctggcggacgacggccagctcgatgcgctgaaggcgcgcatccagcgcgggctgctgagcaagaagcagacccatttcctgcatcagggcaacagcgggatcacccagaacctgtcgtttatcggcggctgacagccaataggagcttattgaaccatgagccatgcgagcagcgagtttattgcggcgcatatcgccatcctgaccgtgtccgacagccgcggcgcggcggaagacacctccggccaatatctgcaggacgcggcgcaggaagccggccatcaggtggtggatcgcgccatcgtcaaagatgacatttaccagatccgcgcacgggtttccgcgtggatcgccgatgacaacgtgcaggcggtgctgatcaccggcggcaccggttttaccgcgcgcgacaacacgccggaagcgctgttgccgctgttcgacagagaggtggaagggttcggcgaactgttccgcatggtgtcgtacgaagagatcggcaccgcgacgatccagtcgcgcgcgctggccggcctggccaaccgcacggtgattttcgccatgccgggttccacccgcgcctgccgcaccgcctgggagcggattatcgaagagcagttggacgcgcgccatcggccgtgcaacttccagccccatttaaagaagccctgagtcatgacacagctaacccacattaacgccgccggcgaagcccatatggtcgacgtttccgccaaggccgaaacggtgcgcgaggcgcgcgccgaagccttcgtcgagatgctgcccgccacgctggcgatgatcgtcgacggcagccatcacaagggcgacgtgttcgccacggcgcgcatcgccggcattcaggcggccaaacgcacctgggagctgatcccgctgtgccacccgctgatgctgagcaaagtcgaagtgcagctggaggcgcaaacggagcacagccgggtacgcatcgaaacctgctgccggctgaccggcaaaaccggcgtcgagatggaggcgctgaccgccgcctcggtggcggcattgaccatctatgacatgtgcaaagcggtacagaaagacatggtgatcggcccggtgcgcctgctggcgaaaagcggcggcaaatccggcgattttaaggtgaacgcatgatcgatattcttttcttcgcgcaggtgcgcgaactggtgggtaccggcgcgctgtcgatgccggcggattacccgaccgtcgaggcgctgcgccaggcgctgtgcgcgcgcggcgatcgctgggcgctggcgctggagtccggcaaactgctggcggcggtcaatcagtcgctggtggcggcggatcatccgctgcgcgccggcgatgaggtggccttcttcccgccggtcaccggggggtaagcatggaaaacacccgcattcgcgtgggcgaagcgccgttcaacgtcggcgacgagtatcagtggctggcgcagtgcgacgccgacggcgcggtggtgaccttcaccggcaaggtgcgcaaccataaccttggggacgacgtcagcgcgctgacgctggaacactaccccggcatgaccgagaaggcgctggcggagatcgtggccgaggcgcgcagccgctggccgctgcagcgcgtgacggtgatccaccgcgttggcgcgctgtatcccggcgacgagatcgtgttcgttggcgtgaccggcgcgcaccgcagcatggcgttcgccgccagcgagttcatcatggactacctgaagacccgcgcgccgttctggaagcgcgaagcgaccggccagggcgatcgttgggtggacgctcgcgacagcgatcgcgaggccgcgcagcgctggcacgacgcggctaaataacgcgtcaacagcggaaacaaatcaagacctttgccgctttcgcgcggcctattctgtggtacgcttatagcaggcgaagccccgttcgcggggcttcggaatcttgtttacaacgcaaaaggtaaccgtcatggaccgatatccacgctctaatggttcaatcgtcgaacgtgccaacagcggcattcaggcctacatggcgcaggtttacggctggatgacctgcggtctgctgctgacggcgttcgtttcctggtatgcggccaatacgcccgcgatcctcaacttcatcttctccagccagatcaccttcttcggtctgatcatcgcccagttggcgctggtgttcgtgatttccggcatggtcaaccgcctgagcggcgcggtggccacctcgctgttcatgctgtactcggcgctgaccgggctgacgctgtcgagcatcttcatcgcgtacacctacagctcgatcgccagcactttcgtcgtcaccgccggcatgttcggcgcgatgagcctgtacggctacaccaccaagcgcgatctgagcggcttcggcagcatgttgttcatggcgctgatcggcatcgtgctggcttcgctggtgaacatctggctgaaaagcaccgcgctgatgtgggcgattacctacattggggtggtggtgttcgtcggtctgaccgcgtacgacacgcaaaaactcaaggcgatgggcgagcagctgaacgccgatgataaagacggcttccgcaagtacgccatcgttggcgcgctgacgctgtatctcgactttatcaacctgttcctgatgttgctgcgcatcttcggcaaccgccgctaaatccgtcgtctttcaagccttagggtatctggcgatcaaaaagctctgcatgtgatatgcagagctttttttatgcgatcttgcggcggaacagcgcgtaggcggcgctgccggtggtggcggttatcaccagcagcggccacaggctgcgccagatgatgctgaagctggcgtccttcaggtagatctgcttggtgatgtcggtgaagtggcgtatcgggttcacccaggtcagatcctgcagccacaccggcatattctccaccggcgagacgtaacccgagagcaggatcgccggcatcatgaacacgaacacgccgataaacgcctgctgctgagtggcgcacagcgacgagatcagcaggccgaaaccgaccagcgacagcccgtagagcagcatggtggcatagaacagcaacagcgatccggcgaacgggatctggtacaggaagatgccgatcaacagcacgatgctggactggaagctggcgacgatcagcgccggcaccgccttgccgataaagatctgccaggtggtgagcggcgagaccagcagctgttccagcgtgccctgttcgcgttcgcgcgccaccgacagcgaggtgacgatcagcacgccgatggtggtgatcatggcgatcagcgacggtaccacaaaccatttgtagtccagattcgggttataccagttgcgcaccaccagttcgctgttgttgggtttggcgcggttgccgagcagctcgttctgatattcctgcacgatctgctgtacgtagttggcggcgatctgcgcgctgttggagttgcgcccgtcgagcagcagctgcagcggcgcggtgtggccggcggcgatatcgcgcgagaactgcgccgggaagcggatcagcagcagcgcccgctggttgtcgatggtggtctttatctcctgcggattgcgcagcagcagcacatgggagaaggctttggccttggcgaagcgttgggtcagctccaccgaggcctggccgctgtcctcgctgtagaccgcgatggtggcgttggtgacttccagcgtcgcggcgaacgggaacagcagcacctgtaggatcaccggcatgatcaggatggcgcgggtttgcggatcgcgcagcagcgcctgcatttccttgatgataagcgtcaacagacggtgaaacatcgctctttctccttaatccagccggcgctgggttttccaggccgtcaggccgatgaacaccacggcggaagcgatcaggaacagcagattgatcgccagcacggtgccgacgttgcccgccaggaacagcgtttgcagcgtgctgacgaagtaacgcgccggaatgatgtaggtcaccgcgcgcacgatggccggcatgctgtcgatttggaaaatgaagccggacagcatgatcgacggcagaaaggcggcgttcagcgccaccatcgccgcgttgaactggttgcgggtgagggtggagatcagcaggcccatgccgagggtgctggcgaggaacaggctgctgatcagcagcaggatcggcagcgaaccgcgatagggcacgccgagcacccagaccgccaccgccatgcacagcgccatggcgatcatgccgaggaagtaataggggatcagcttggagagcagcagctcgctgcgcgtcacctgggtggacagcagagcctccatggtgccgcgctcccattcgcgggcgatcaccagcgaggtgagaatggcgccgatcaccgtcatgatgatggtgatggcgccgggaatgatgtagtgccggctgatggccgccgggttgaaccagtagcgcatctgcacgtcaatcagcggctggtcgctgctcccccgatcggcggcgcgttgctgctgccatacttgccatacgccctgggcatagccctgcacgaagttggcggtgttcggctcgctgccgtcggtgatcacctggataggggcgctgtcgtgcgggcgcgccatgcgctggtcgaaatccaccgggatcaccaccaggccgcggatcgtgccggcctgcatctgctggatcagctgctggcggttgtcgctgatggtcggttcgatatagggcgaaccggcgaaggcgtgggccaaatcgcgcgcgtcttcgctctgttgttccatcagaatgcccagatgcagcttgctggagtccaggttgatgccgtagccgaagataaacagcagcatcagcgggataacgaaggcgatcaggccgctgctgggatcgcgcagtatctgccgcgtctccttcaggcacagcgcgcgcagccggcgccaggagaagccgccgtcgtcgaatgggggtcggttatcgctcaccgtgtttcctcctcgtcgtagccctgcaccagctcgataaacgcctgctccatcgaagggctgggattgtcgtcgcgcgccacctgttgtttgagatcgtccggcgtgccggcggcgatgatcttgccgcgatacaccaggccgatgcggtcgcagtattccgcctcgtccataaagtgggtggtcaccatcacagtgacgcccttgtcgaccatgccgttgatgtgcagccagaactcgcgccgcgtcagcggatcgacgccggaagtcggttcgtcgaggaacagaatatccggttcgtgcatcagcgcgcaggccagcgccaggcgctgtttgaagccgagcggcagcgcgtccggcgtctgatcgaggatcggcgcgaagttgaaggcgcgcgacatttcgtcgattttgtcgcgctgcgccttgccgctcaggccgtagacaccggagaagaacttcaggttctgcgccaccgtcaggttgccgtacagcgagaatttttgcgccatgtagccgaggcgctggcgcgccttgccggaactggtcttcagatccatccccagcaccagcgccttgccgccggacggcactagcaggccgcacatcattttgaaggtggtggacttgccggcgccgttcgggccgagcaggccgaagatttctccgcgccgcacctgaaagtcgacgtgatcggtggcggcgaagtcgccgaattttttggtcagctgcaccgcttcgatcaccgtttcgccgctttcaccgttgacggtcggcatgatctccgccagcgccgagcgatggttggggccgccgccgagcagatcgataaacgcatcctcgaagcgcggatccgcctcgtccagttcggcgtccggtagatccagcgcctgcagcagctgccggtgatcttcgccttctttcaggatcaggcgcaggtacttgccctggatcacgccgtcggtgaccgccggcaggcagatcgcccgctgcagcaacgatcgatggctgcccggcggcgcggcgatcaacaccgtgcgcccggccatgcgctgggtcagatcctgcggcgcgccgctgaacagcagctcaccctcgttgagcaacagcacttcgcggcactgctcggcctcgtcgagataagaggtactccacaggatcaacatgccgtcattggccagctcgtgcaccatgcgccacagctcgcggcgcgagataggatcgacgccgacgcccggctcgtccagcaacagcacctggggttcgccgaccagcgtgcaggccaggccgagcttctgtttcatgccgccggacagcttgcccgccaggcgctcggtgaaacgcgtcagatcggtgaatttcaacagccgttcaaaggtctggcggcgaagatcgccggtaacgccgcgcagatcggcgtacagcgtcaggttctccatcaccgtcagatcctcatacagcccgaacttctgcggcatgtagccgaggatcgcgtgcagttgacgatcctgcgcgatcggatccagcccggcgacccgcaatttgccgctgctgggctgtagcagcccggccagcatgcgcagcagggtggttttgccggcgccgtccgggccgaccagcccgatgaccgcgccgctgcgcagggtggtggtcaggctggcgaccgccggtttctcaagcgacgggaagcgcttttccagcccttccagttcgatggtgtgcgcctgttccatggccggcctcagggtttggcgaagcgcagggtgaccggcatgccctggcgcagcgcgtcgtcggcgtcggtgacgatcacccgcaggcggtacaccagatcggtgcgcagatccggcgtttcaacgcttttcggcgtgaactccgcggttggcgagacgaaaccgatcttgccgtggtaaggcttgtcggggcggccgtcggtgtaaatttccagctcggtgccgggcaccgcctggttcaggctggtctcgttgacgtaggcgcgcacccacaccggtcgggtcagcgacagggtgaacaccgtaccgccggcgccgagcatggtgcccggctccaccgcgcgggtcagcaccgtgccggcggacggggagatcagcgtggcgtcttgcagattcaattgcgcctgcgccaacgccgcttcgctttgcgccacctcggccttggcctgttcaatctcttgcgggcgattgccgctgcggtattgcgacagcttgtccttcgccgcctgcaggttggcctgcgcctgattgcgggcggtgcgcgcatcttccagcgcgtcggcggacgtggcgtttttcgcccacagcccttgctggcgcttcaggaagctgtcggcgtaggcgaaggcggactggcgctgcgccatttctgactgcacctgggcgatctcttcggtgcgatagccggcctgcagcagcgacagtttggcacgcgcgctgccgacgttggcctcggcctgctgcagcgcgttgcgatagggggcatcgtccagtttgccgagcagctggcccggctgaacggcatcgccttcatccaccgtcagcgacgccaggcggccgtcgacgcggaagccgaggttgaccgtgcggatatcgacgttgccgtacagcgtcagcggcttatcctgctgctgttggtaatgccagaccgcgtaagcggcggccgcgatcagcagaattaacaacacgatcaaggcactgcgttttttgttcataacactccctgcctgaatttacgcgccgtgacgttggcgcagcccaataaccaaaatctcgatatgctcgctcagcaccgccgcgatttgcgccgcttcactttcaccaatctcttgccagccggcctgacggcggatggtctctcgcgccacgcggaacgacagcacctcgccgatcagcgcgtgggtatgcagcaccaggcgagtggcgtgctcgtcaatgccggtggcggccgacagcaggcggcacagccgctcgtgcatcggcgcgatcacctggcggtggatcagcggataggcctcggtcggggcgagctgttcgcgcgacatgattttgctcaggttcagcgtgtgcggctgggtcatcagctcgctgaaggccagcaggccacgctgcagcaagcgtagcgccgcgtcgggtgagcgttgttcgggcacttcttgcccaaagcgatcgacctcttcggccaacggggcgaacgcctgctgaatgaaatcggcgagcgactgcgctacggccagatacagcccctctttggagctgaagtagtaggtgatggcggcgatgttctggccggcgcgctgggcgatatcgcgcgtggtggcgccctgcaggccgaattcgccgaacagttcggtcgccgcggcgagcagttgccggcgcgtttgctcgccacgcgcccggccggcggcctgatgaggtacggaagctggcatgggtcacgctcgaagttaatcaatcatatgattaactttatgccagattgtctaaaacgcaaccgctaaccacaatgagttatgtgatcggcttcagacaatgctgaatttacggcagattgtgctctgggtgcgtaaaagtgctttttattgcgcgacttctgttacaatcgccgcctggtgcactgcagtttgtgccaatccctcgtggtcatgcttaatgccccgtctgatcatcctcccaggaaactgcaccgaacaccgttaggttaggggggatctggagtttttctctttatgtcatttgaaaccctcggcttaagtgctgaaattgtgcgcgctgttgaagaacagggctatcgtgaaccgacgccaatccagcgtcaggctatccctgtcgtgcttgaaggtcgtgacctgatggccagcgcccagaccggcaccggtaaaaccgccggttttaccctgccgctgttgcagctgctgagcaagcatgaccatccggtcaagggccgtcgcccggtgcgcgcgctgatcctgacgccaacccgtgagctggcggcgcagatcggcgaaaacgtcgatgcctacagcaaacacctgcgcctgcgttcgctggtggtgtttggcggcgtgagcatcaacccgcagatgatgaagctgcgcggcggcgtcgatatcctggtggcgacgccgggccgtctgctggatctggagcatcagaacgcggttgacctgtccaaaatcgaaattctggtgctggatgaagcggaccgcatgctggacatgggctttatccacgacattcgccgcgtgctggccaagctgccggccaagcgccagaacctgctgttctccgcgaccttctccgacgacatcaaggcgctggccaacaagctgctgcataacccggcctcggtggaagtggcgcgccgcaacaccgcgtccgagcagattgagcagagcgtgcacttcgtcgacaagaagcgtaagcgggaactgctgtcgcagatgatcggcgaaggcgactggaaacaggtgctggtgtttacccgcaccaagcacggcgccaaccatctggcggaacagctgaacaaagacggcatcactgccgcggcgatccacggtaacaagagccagggcgcccgtacccgcgcgctggccgatttcaaagacggccgcatccgcgtgctggtggcgactgacatcgcggcgcgcggtctggatatcgaccagctgccgcacgtggtgaactacgagctgcctaacgtgccggaagactatgtgcaccgtatcggccgtaccggccgcgcggagcgtaccggtgaggctatctcgctggtgtgcgtggatgagcacaagctgctgcgcgacatcgagcgtctgctgaagcgtgaaattccgcgcattgcgctgccgggctacgagccggatccgaccatcaaggccgagccgatcatcaacggccgtcagggtggcgggcgcggcgcgccgcgcggcaacggcggcggccagcgttccggtaacggcggcggtcagcgcagcggtaacgcgaacggcggccagcgtgaaaaccgtggcaacgctaacggtaacgcccgcccgcagggtgatggccagcgtcgttccggcgcgccgtcttcgcgccgcccgcgcaaccgcaaaccggccgaataagcctgattgctcaaagagtaagccgccgatacgggcggcttttttttttgcctggcggaacggcattttcgtactaggctggacggtggctacccctagattccaggagacggagatgaaattaaagtgcgcaattctcgatgattaccagcaggtggcgctcaagatggcggactggtcggcgctggccgatcgggtggaggtgtcggccatcagcgcgcactttaccgatgaagcggagctggcggtgcatctgcaggagtgcgacattctggtcatcatgcgcgagcgcacgccgatgaccgcctcgctgctggctcggctgccgaagctgaagctgctgatcacctccggcatgcgcaacgccgctatcgatctggccgccgccgccgagcgcggcgtggtggtgtgcggcaccgccagcggctcggccgcgccgatggaactgacctgggcgctgctgctcgggctggcgaagcatatcgtgccggaaagcgtcgggctgcaaaacaatggcccgtggcagctgggcttaggcgtcacgctgcagggcaagacgctggggttgctggggctgggcaagatcggcggccagatggcccgggtggcgcaggcgttcggcatgcgggtgctggcctggagccagaacctgacggcggaacgggcggcgcaggagggcgctgagctggcgccgtccaagcgggcgctgtttgagcagagcgactttgtctccattcacctggtgctgagcgatcgcagccgcgggttggtggggcgtgatgaattggcggcgatgaagcccaccgcgtacctgatcaatacctcgcgcgcgggcatcgtcgatcgggcggcgttggtggacgtcctgcaacagcgtaagatcgccggcgccgggctggacgtgttcgagacggagccgctgccggccgacgacgtgtttcgccagctgcccaacgtgctggcgacgccgcatgtgggttatgtggcggacgacaattaccgcgcctacttcaccgaggcggtcgaggacattgcggcgttccttgccggccaaccgatccgccggctgggctgacggcatttttaatgcccgctgaggcttgtctggcgcgggcattcacccgtatcattgcgggtctttttttagctgggattggtcatgcgcgtattattggctccgatggagggcgttctcgattctttggtgcgtgagttactcaccgaagtgaacgactacgatctgtgcatcaccgaatttttgcgcgtggtcgatcagctgctgccggccaagtcgttctaccggctgtgcccggagctgcgtcacgccagccgcacgccgtcgggcacgctggtgcgggtacagctgctggggcagtatccgcagtggctggcggaaaacgccgcgcgtgcggtggaattgggctcttacggcgtcgatctcaactgcggctgcccgtccaagctggtgaacggcagcggcggcggggcgacgctgctcaaagatccggaattgatctaccagggcgccaaagcgatgcgcgcggcggtgccggcccatctgccggtcacggtgaaggtgcgcctgggctgggactcctccaatcgcagctttgaaatcgccgatgcggtgcagcaggcgggcgccagtgagctgacggtgcacggccgcaccaaagaggacggctacaaggcggatcgcatcaactgggcggcgatcggcgagatccgtcagcggctgagcatcccggttgtcgccaacggcgagatctgggatcaccagagcgcgcaggattgcctgcaggcgaccggctgcgacgccatcatgctggggcgcggcgcgctcaacgtgccgaacctgagccgggtggtgaagtacaacgaactgcgcatgccctggccgcaggtggttgagctgctgcaaaaatacgtccatctggaaaagcagggcgacaccggtctgtatcacgtggcgcgcattaaacagtggctgggttatttgcgtaaagaatatgatgaagccaccgaactgttcagcgaaatacgcgcgctgacgacatccggggatattgcgcgcgtcatctgccgtagctaaaaataaacccgcacgcagcgggtttatttaaatcggtattatcaggcggctttgtcgagacggttcaattctatctcgatatcctgaatggttttttccagcccttccagacaggcgccctgcttattcaacaggtcgttaatggcttcggcgaataccttatttttgcattccccctgatcgaaggccagccagtgtgcggagagcgtctcgatattcgactgtgcgtagtggcgcatttccttcagctgggaagcgacgttgcgtaaattatccagctgcgcctgtgcatttgcattgttgctcatgaatttctccttgagttggccgttaaataatttcgactgcgggatcaagcttaccctatttaaataaaaatatcaccctgagtggtctgggtggttatttttgagtgggtgtggctatatttattgttcggctgaacaaggacttgggtggaattgtaaaaatagataaatacggtgtttttggcgattattttcggccatcccatacgggatgaccgttattctaacgcttaagagtgatgcttattatgccgcgtccgccagcataaacatgccgtaggggtgaatttccagataatactgctcgccgacgttcggttgcaggcgggtggcgttaacctgcagcaaaatttgctgcccgtgccacgccaccgttacctcatactgcggccccatgtaggcgacatgttcgatcacgcagcgctggctttcatcgccatgctcgctcagcgtgatcgcctccgggcgcacgcccaccgtgccggcgccctgggcggcaaagtgcgcggggcgcggcagacgatagccgctgatgtcgacatgatcggcgctgaagctggccgggaacaggttggcgtcccccataaagctcgccataaagcgcgaggcgggctgccgatagagatcctgcggcgagcccatctgcatgatatgccccttgttcatcaccagcacggtgtcggagaccgcaaaagcctcgctctgatcgtgggtgacgtacagcgacgtgatatcaaactgcttttgcagctcgcggatcttttcacgcatgctgcggcgcaggttggcgtcgaggttgctcaacggctcgtcgaacaacagcactttcggcttgaggatcagcgcgcgcgccagagccacgcgctgctgttggccgccggagatctgatcgacatagcgatcgtcaaaccccgccagatccaccatcgccagcgcttcctgcacgcgcgctttcacttcggcgcgcgggatgccgagcatcttcaggccatagccgacgttttcccccagcgacatatgcgggaacagggcataagactggaacaccatgcagatatcacgctgctggatggaacgatgggtaacgtcttcaccatcaatgaatatctgcccgtcgctcggcttttccagcccggcgaccaggcgcaaaatggtggttttgccgcagccggaagggccgagcagcgtcaccatttgcccccgcgggatggtgagcgtgatgttatcgattaccgtgttgttgccgaaccgtttggagacgttgcgcagttcaacgaaatttttctggctcatcatgggctccattacgcctggtttttggcttttgaacgggagatgcgtgcctcgccgatcagccagtcaaagaggaaaataatcgccagcatcaccacgatcagaattgaaccgtaggcgatcgccacgccgtattcgccgtcttccacgcggttgaggatgtaggcggtggccacgcgggtatcgggcgtcaccaggaagacgatggcgctgacggtggtgatggcgcgcacgaagctgtagatcagcgccgacaggatcgccgggcgcagcagcggcagcaggatgtgcgtgatggtgcgcagcgagccggcgcgcaggctgagcgaggcttcgtccagcgatttgtctatctggcccagcccggcgatcccggcgcgaatgcccaccggcacgttgcgcatcaccatcgagataatcacgatggcggccgtgccggtgaggtacaccggcgcgccgttaaaggcgagaatgtaagagacgcccgccacggtgcccggcaccgcaaagcacagcatggtggtgaactcgatggtctttttgcccttgaactgctggcgcaccacgatccaggcgatcagcaggccgaacgcggcggtgatcggcgcggcgatcccggcgtacagcagcgtatcgagcagcgaaggccacgcgccgtcgctcatgccctggccgaacagcttgatgaagttatccagcgtcagcgtgtaatccaccccccagttgacggtgaagctgccgtagaaaatgctgccgtaaagcagggcgttaaaggctacccacaccgccagcagcgcgatcacgctccataccagcgtgaccggcagcggctgtacgtcgccgcgataggatttgccggacacggtgacgtaggaacgcttgccgatccacatatactggatgcagaacaccaacagcgagaacagcagcaggaaggcgccgagggtgctggcggcctgataatcgagctgtgaaccggtaatgtagaaatagatttgcgtcgccagcacgtcgaagttgccgccgagcaccagcgggttgctgaagtcggccagcgattgcaccaccacgatcagaaacgcgttggccagcgccggtttcagcagcggcacgaacacgccgttaaaggtttgccaacggctggcgcgcagggtgtaggaggcctcttccagcgaaggatgaatggtcttgatcgcgccgtcgaggatcatgaacgccatcggggtgaacgccagcacctgcgccagccagatgccggtaaagccgtacagccagttggtgttggtcaggccgaaccaggccaccatccactcggtcacgtagccggagcgccccatcatcagcgtgacgcccaggccgacgacgaacggcggcgtgacgatgggcaggatggagaagatgcggccgataatggcgctgcgcttggcgatgcgggtggtgtaaatcgccagcaccaggccgaagaaggtgcagccggcgcctaccgcgatcgacagggcgatggagttgaggatcacctggacgatgtgcgcctgcgacagcacattcataaacgccagcggcgcgaaagcgcccgtctggtcggtgaacatcggaatgaaaatcgcgatgctcggccagacgatgaagacgccgatcagcgccacgatggtgaccagcgcgccgataacgaaacggtcgccgcccagccagtcgaggcgggtcagcgccaacgtcatgatggcgcccagcgcggtcaactgcaccagggtggcgtagcctaaaccgcgccccgccagcgtggcgctgacgacgataaaggccatgcacagcagcgcccagccggcgtcgaacgcgtggcgccgccgccgttcaccgcccgccgcagcgtaagggcgcagcagcagcaggctcggcagcaggcaccaaagccagctgatattgcgatttgaccagccgtaggccgcgaggatctcttcgccggtggactccagcaggccgtaatccaggctccagctcggcagcagggcgaacgccagccagccgagcaaaacccaaaggaatatcgcatctcgttttttcacgagatggagtgcatgtgtatgtgacataagtttcccggatgttcaggccgggcaaaccgtgaggcttacccggcaacaggcgcagaatgtgggcttatttacccatcttgacttcgctgacccatttgttgatcagcgccttgcggacctcggtcgagccgtacttgtccatgtcgtagttgatcagcttcaggtcgtcgagcttcagcgagttcggcgaggtgtcggcggtggtattggtcaggatctgataggatttgccttgcttccacgccagctcctgcgcctctttcgacagcacccaatccacgaacagcttggcgttgtcgaggttgcgcgcgcctttgaggatgctgacgccgccgatttcatagccggtgccttcgcaaggcgagatcagctccagcggcgcgccctgttccttttcgagcgagtagtcatgcaggaaaccgatgccgatcgccgtttcaccgcgggcggcgttgcgcgccggggcaatgccggacttggtgtactgcgaaacgttggcgttcagctgcttgaggtaatcgaacgcctgatcgtctccccacagctgggcaaaggtcgccagcgcggtgtaggcggtgccggagctttgcggatcggcgatttgaatctcgcccttgtattccggcttggtcaggtctttccagcattttggcaccggcaggtttttctctttcaggcgctgggtgttgacgccgaaaccgagaatgccgacgtagaccgccgaggagtagttgcctttcagcttggccggatcgcggaattgcgtcatcacctgttcgaggttcggcgatttgtacggctgcagcagccccatttcaccggcctgggattgcggatcgagcgtgccgccgtaccagacgtccgcctgcgggttcttcttctcggcatccactttcgccagcgtgctgccggatccgttgcggatgaacgaggttttcacgtcatatttctcgccgaaggctttggtttccgcttcgcacatttcattggtggcgctgcagtagaccaccaggcggcccttggcgtgcgcggcgccgctcagcgtcgccagcgcgatgccggacgctatcagggtagtgacccacgtttttttcattgttttatccttctctcggtagaggtggtaacgctcgccatcagcagcggcatcagcaataaacccataagaacggcggcgatggacagcaaactgaacatgcccgaccagccgtagccttcgatgacccgcgacagcggccagcccgccagcgccgcccccaggtaggcgaacaggccgagaaagccggtgatggagcccgcggcgcctttgtgcccgcattccacggcggcgaggccaatcaacatctgtgggccgaagacaaaaaagcccaccgtaaagaaacagcccgccagcagcgcgtagtgatgcaccggcgccagccacagcgcggcgacggaaaccatcagcccgagcgtgaacagcaaaatcatcggcgcgcgctgcccgccgaacagcacatccgatccccagccggcgaacagcgcgccgagcaggccgcctatctcgaacagcatcaccgtcgcgttggcgctgagcaggttaacgccgtggctttccgtcaaccacagattgccccagtcgttcaaggcgatgcggatcaggtagaccagcacgtaagagacgcccagcagccagatcatcgggttcttcagcatcgtggtgcgcaacatccgccacagccccatcggcgggctttgctgttcctggcgcagctccagcggatcgtggcgccaccggccgaccgacggcaggccttcttcctgcggtgtgcctgtcagccgccgcgtcagccagaggcccaacaccatgctgacggcccccgggatcaacatcgccgcctgccagccccagcgctgggcggcgaaggcgctgatcagcggcacgatcgcgccgccgaggttgatcgacatattccagcagccccaccagaagccgcgctcgttgcgcgaataccagtgggtcagcagccgcgcgcagggcggccagccccagccctgaaagaagccgttcagcgcccaaaccgccaacagcagcgtcagcgattcaccgaaggcgaacgccacgttcagcacgccggtggcgaacaggccgatccccataaacctgcgctgcccgtggccgtcgtgccacaatccggcgctgaatttcgacaggccgtagctcagataaaacagcgagccgagcaggccgatgtcccctttatccagccccaaatccatttgcagcgccggcagcacgtaattcacgcttttgcgcgtcaggtaaaaggcggcgtagccgatgaccatgtacagcagcagtcgcgggcgcagcgcgcggtaacgatgatcgatttcagatgccgagcgtgtctgcatagccgtctccctggtgatgactataagaaggtgaaagggaaaggggatgagagaaagtccggactggctaagactttttcctagttagtcggcggtttgttgcaaatttgtgggcaggttaacaattacccgcgtgccgcgctgcgtgtccagcgtcagttcgccgccgagcgcgctgacccgttcgcgcattccctgaatgccgaggccgggcgccttgtccgcccggatgccgatgccgttgtcccgcacctcgaggtgcaaaagtgccccctgttgatacaaaacgatggcgacttcgctggcttcggcgtgtttgcacacgttgttgagcagctcttgcagcagccggtagagggtgaagcgcaccgtctcgccggcgggcgtgtcgatgagccggtagtcgaaacggcaacggatgccccgttcgctgaaggcgaattcattcagcaggtggtgaagcgcgtctttgaacgccagctcgtccagcgcgggcgggcgcagctggcgcagcagctggcgcgtggagtgatgtatgcgccgggcgagatcggctatctggttcgcggcggcctgggtttgcgccggatcgcgcgcccgcttgaccagctgcgactgaatttgaatcgcggtgatgttctggccgatttcatcgtgcagctcgcgcgccaggttctttcgcgtgtcttcttcggtgtggatcagtttttcggtcaacgcccgccgcgccgccagctcttcttccagccgtcggcgatagtggtgcaggttttgcgccaggtgctgctgacggctgatggcgatgcccagaccgatgccaagcagcgcctgcgtcgccagaaagatttccagctcgaccagattgccgaaccccacgccgacctgccgcgcgagggtgatcatcatgctgccgagcaggccggacagcacgccgccctgccagccgaacttccacgccatcaccacgttcggcaaaaacaccacgatcagcagcaggcgttcgatttccggcgacagcaccatctgggtgccgatgccgataacgaaaaacaggctgcaccagatgattaaggacgcgcgcagcggcgggttgctggtgtccagccccagcagatggtagcggtgctgctggcgcagaaattcaaaaatcaggtagacgaacggggtcagcaagacaccaccggtaaatgacgccaggccgagcagcatcgccgggctgtgtgcgaaaggcgcaagcagggcggtattgagcagcgaggcggcggtcactgcggccagcagcagcgtcagccgttgccagtagagcggaaaacggcgccagaatcgctgtgcgagcgcggccgggagcagggtgatgaacggcgcggccagcaggctgtagccgctcagcaggcgttcgccgtgcagccagaacagcagcagcaccggcggtattatcagggcgggccaatagcggcgcgccagcaggatcagcagcgcgagatagacgccgtgaggcagaaacagcgccgcctgattgccgttgtgggtcaggtagaaaccgagcgtccacagcatcagccagccgctgccccaggccaacaggataaacagcgagataacccagggccggaagcggggcgacatcaatgccccgccagcagctgatggtcgagggcgaaatgcaccagttcaatggtgctgctgcactgcagcttgcccaggacgttggcgcgatgcacgtgcaccgttttgtggctgagatcgagcttgaaagcgatctcctttacgctgtcgcctttgaccagcagatcgaagatctcgcgctcgcgcggggtcaacgcttccagcgccgtggccggctgctcgccgccgcgcagcgcccgcagcgcgtcggcgcacaggtaatggccgcccatatcgacggagcgcaccgcctgcaccagttcttccggcccgcagcgtttggtcagatagccgctggcgccggcatccagcgcgctctgcacgaaggtcggggagtcatagatactgaggatgatcgcgcgaaactgcggcttctgcgcccgcaggcgtttcaacaggctcaggccgttttcatccggcatggcgatgtccatcaccgcgacgctgacgtcgtcgcgcagcaatgccggccaggccgccgccgcgctgctgtattgccccaccacgtcgagatcgtcctcgaggctgagcaattgcgcaaagccggagcgcaccaccacatggtcatccaccagtatcacacggatcatttttcgcactctgttgccgaatcatggccctatgatgcctgccgccgcggtgctggcaatcagccaagcgcggttatgcaatcggtgtaacagaatcgtaataaaagggcgccgccggtgtaatgctggttacttaagcctgactggtattttttatccagtatctttacgtgatgtgcaggatgaattgccgtaaataccctgaatttttctgttaccacaatgaacggcaattggaggggccgaaggcgcggcccctccacccgcgccttcgcttaacaccgtctgtccgctgcgcggataccctcgcagcgtctgcattgtcgggcgggtcggctgcgacaaacgtccctgttagtctcgcctcaaccggccttccctggccggttgcccctgacaatgctgtcttgctcggcagccggtgatgcgcgccaaaggtcaaccccgtgctagcagctcccgtcctttatgaggtcatggcagagaagaggaatcggagatgagcgcggtattggatgcccttgaagacgccgaacgcaggcatagcgtattaggcgaaaccgccatggacggcggtttcaggtgagacaggcagggacgcctgtcgcaaccggcctcaatgcggtatggcggagagagggacgttggcaaagccaaccgtctgatagggcaaaggcgcgggttgccaggggccgcgccttcggcccctggctcggtcgaggcgtatgagcctcatggcgcatctcacctttatcgaccgaaaactgcacaaatacgttcagaaaaacgctaactgatcagcattacgccgctggcggcgttaacgatccacatcgatggcgaaatgctgccacagtacggcgcgccgttcctcttccgaatgcagcgtcgtttcgtggcgctggtgatcttcggtcacgatcagcttcatgtcgctgagggtcacccggccgtggtccgtcggccgtgaacacaccaggcgctgggtgaagtgcgactgcggcgaggtgctgtggaatcggcacatctcgtcgaactcgtgcaactcgcgcggctgaacggtaaagcgatacagcgttttggcatgcgagcgttggtcgccgttgcggcgctccagcaggtaatactcgccttcccgctccaggtggaaggtgccgctggcctgcggttgcggctcggcgacgacgatcttcagcggcgtcaggaaggaatcgccgaaaccgacatccaccagccaggcctgccccgccagatccacccgcagcgccagatggtcgtagggcgggccgaaatggccgtcgcgcgtgcggatctcgccggagatgaagctcaccttgaaaccgatctcccgcaacagcagggcgaacagcgtgttcagctcataacagaaaccgccgcggttacgctcgaccaccttgctgaacagcgcctccggcgccagctgaatgccctgatgataaataatgctcaggttctcgaacggtacgctcagcatgtggcgatggtgcagctgttgcaacgtggggaggtcagggcgggcggtgccggcaaagccgatatgctgcaggtagcgttgggtatccacagggtgtctcgcatgagaaaaagtaggcataaaatagcgggctttgcggcgtttgtgagcgcattacgtgctgcgttgttggcataactcataaccaaatcgactcagatgtcagcatggctgccgttacactgaatcgatatggataaggagaaagtatggatttaaccttgaaagcgcagcgatttgccaatgacgctcaccatgcctgcaatcagcggcgcaagttcaccggagagccgtatatcgtgcaccccgcggcggtggtggatttgctgcagcgggctgagccgacgccagaaatggtcgccgctgcctggctgcatgatacggtagaagatacggcggtgaccctggcggatatccggcgagaattcggtccgacggtcgagcgttatgtggaaatgttgaccgacgtgcagcctcgcagctacggcggtgagcgtctgcaccgtaaaaatgccaatctgcagcacagcgcgcaggcctgtgcggaagcgcagaccatcaaactgtgcgacttgattgacaacagcaaaaacattaccgattacgatgtctcctttgcccgtcactatctggtggaaatggcgcgcttattggctgttttatcggcgggcgagaccggcctgttggccttggcccgccgacagtgtgcggaagcgatcgagcgcatcaacgatcgtcatggagacgacggctggttcgacgcgttgtggcggaagtatgaggcccatcttaagctggatgagctgaaaactgggtcagcagcaaaataacaggaatggtgaccgccgccagcaacgtttggatcgtgatgataccggccgacaagcgatgatcgccgcccagcagtttcgccatgatgtaggcggaaggtgtacagggtaaggcgttaaacaggacgatagtcgccagcaccgggccggagatgcccagggtgatgccgattcccagcgtcaacagcggtaccagcagtaacttgacgaaggtcgattgcagtacggggccctgtgccgtacgcgccgctttgatatccagccccgcgccgaccgccagcaaccccaacggcagagaggcgccgccgagaatggtgagaatgttctccagcgccgtgccgagcgaccagccgctggcattgaaggccagaccggccaagaccgaaaggatcactgggtttttccccagcgctttggcgatctgtctgccgccggggcgggagccctggccgtaatgcatcagtatgacaatcgaggccacgttcaacagcgggatggcgacggcgatgctgattgaggtcaccgtcaggccggtgtggccgaaagtcgccgccgctgcggcaaccccgatgtaggtattggggcgcagagcgccctgtatgacggaagagaaaaccggcccgggctgttttagccagattcgccagaggtacaacgacaaggcgccgatcaacacggcgcccaggaccgacagggcgatcggccgtaccggaaactggctcaggtcggctttgccgacctgaataaacatcagcgccgggaagagataaaagtagttcagcttctcgcagggcagccagaaagcccgatcgatcaggtttttgtgccgcagagtgaatcccatggcgattaaaaatatcaccgggatcagagaaaagagagtcgtcgtcatggggagcctataaatagcctttagtgagaacggccacgccatagaaggcaataaagccggttaccattttttcataaacgggagcgctggttctcttgaacagcagattgccgacgaccagatacaccagcagagccagcggtgccgcggcgaaaccgtcgaggttcagggcttgccatttaatgcaggccagcgtggccaattggattaaaccgaacatcaggtaataacgggagacggtggttcttatctccagtttctcgcgatggctggcggtagcgtagagtgccagcaaggcgccacccatgttggtgacgccatgtatcaggcccatgactgcgatataagcgcgctgatgtttgccgagataacgcttcacggtttcctgcagtgacagacgaaagcgcatcaaggcggaaaacagcaggatggcgcccaccagcagatcgacattcatcttcaccgtcgaatgcaagaccaggctcagcgccagaatgacgaaaatggcgcaaatcagcatattgaccttttcgcgagcgggaaaagcaattcgtcgggcgccaagcgtctgcgtcagagagatcagcaccgacgacggcagcagcagcccaagtacggaggagaaatcaacgcccagcattaatagcgtcggtgtaccgaacaccaagatgcccatgccgaaaaccgattggatcacggcaaatagcgcaatcaccagatagaacaacgcatgattatccatcaggccacctcttctttccggtagggttcccgcgccgcgtcagattgcaggtaggcatcggcgctgagcgtgcgcaagatattcccgctgatatgctgattgtcttgctgggcgctgaccagcagcaaaacatcgtgccgatttatcaatccattgtctgacaggacattcagagccaaacgttcggtttccggctgtgtcagatcgatccgaggcaatgtcaggccggtgatgcctggcagcatattccagctgcgcaccgtcgccgcatcgttgccgaatgcgacgatcgggatgccgatgttggccatggcggcgatgcgcacgctgtaacctgtgcgagaaaacaccaccacccgggagatcggcaaggcgcggataagggcgccgacagcctgtcgaatatcgtcaacctgcgcagggggggatgagtggggcgcatgcgctaaatgctgttccgcctgatgggctacgctggcgatacgggcaacggcctccagaggatagcggcctacggcggtttcaccggagagcatcaccgccgcggcgccatccagcaccgcgttggtgatgtcgctgacctccgctttggttggcagcgggttctctatcatgctgtgcagcaattccgtcgctacgatggtgggtttgcccgcatgggaggcggctcggaggatctgtttttggtagagagaaacgcggtcgatcgaggtttccaccgccagatcgccgcgatcgatcatgataacgtcggcggcggcgatgacttcctccagatgctctatgccgccgctgttttccactttcgccacgatgcggggcgtatcgcctccgatcagcgttctgatcgcgttgatgtgtgccgcgctttcgacgaagcttatgccgatgtagtccacttgatgcgctttggcgaaggcgatcatgtcgcgatctttctccgttatcagcgcctgcccgagatcgatgccaggcacattgatgcctttgcggcttttcagttggccgtccatgtcggcctgcaggtagatgtcccgatcgacgatgttaacgacctggaacgagagggtgccatcatcggcgaaaaccttatcacccaccgtcagccgttcatgcaaccggccgtaccccaccgggactttttcctccccgttatgtgaggtatcggtcgtgaggatcagcgtttgccctttagtgaatgagggttcgtgtttcagttgcaatgtgcggatttttctaccgggaatgtccaacagcaccggcgtatccggcaacgttttacgcagcagggcgatggtttccgcatgccagtcgagcgtgttgtgtgaaccgttcaatcgggcgacggacatgccggctttttccagcgctgccaacgtgttgatatggcgagaggcggggccgatggtagcgataatgcgagtctttgccatgataaatgctccgaaaagttaagatgcatttatctatgacagttttgtgacagcggggaaaataggggtttaatctaactaatatataaaaagttataatgagttttggcgtcagagcgggtgtgccttatacatttaatgatgaaaataaaatggttatacaatttacttccatcgtatagataaaatattgataagcattactccttttattcctcgccgtgttgggcatcactgctgccgcaaactgtcacttgccggcgctagcctgtccccctgagttcaacgttgcaggagaacggctatgcaagatttcaaacatcgggtggcgctggtgaccggcgcgtccaccggcattggcgaagcgatcgccgccgagctgtttcggcgcggagccacggtggtgatgaccggccgccacacagcgcctctcaccgccgccgccgcgcggctcgatcccgacggccggcggttgatgacgttgcgaatggacgtgcgcgacgcgcagtcggtgcaacagggtattgaagagatcgtgcggcgctgcggcgcgctgcatctgctggtcaacaacgccgggatcaccggcccgcacgaggtggatatcgatcggtacgcggtcgaagattggcatgaggtgatcgccacttgcctgagcggcacgtttttcggcatgaagtacggcctgccggcgatcgtcgccggcggcggcggggcagtggtgaacctctcttccgccaacggcgtggtgggcattgccgggattgcgccctataccgccgccaagcatggcgtgctgggcctgacgcgctcggcggcgctggaattcgctacgcgcggcgtgcgcgttaatgccgtcgggccgggttatgtggatacgccggcgatgggggaactgccggcgtcggcgcgggcgcagatggccgcttcgcacccgatggggagaatggcgacgcgggaagaagtggcgaaaacggtggctttcctgctttcggacgacagcagtttcaccaccggtgcgttttacagcatcgacggcggttataccgcctgctgagccagcgcctgcagccagcggagaaacgccgctgcgccgggtttttccagcgtgcgcggcgggtaaaccacgtagtagggcttgctgagcggcagcgccggttcggccagggtgaccagccggccctccgccagttcacgggcgatcagccgccgctggccgagcagcaccccgcgcccttgtacggcggcgtcgatggccagcgaggtcaggttataggtcagcccgcgccgtggcggcggcgaccgatcggcggcggtgaaccactcgtgccagcccggcagaaactggctctccttgccccagtcgacgtggatcagcggcagctgcgtccagtcgccgcgatcgcgcagcgccgggctgcatactggctgcacccgatcctgaaacagctgcaccttttccagcagcggataatcctgatcgccgaagcacagggcgaaatccgccgccgaatgggcgaaatcgaccgccgcatgggtggcgtgcagccgcagatcgccgtcggggcactgcgccagccagtcgcccagcgccgggttcagccatttagacgccagcgccggcagggcgaacaccgtcagcgcctgtttgccgcgctggcgttcgacgtgttgctgcgccacgcgcagcgtttcaaacgcctcctgcacgtaggccaggtagtccgcgccctgttcggtcagcgtgacgccgcttttggcgcgaatgaacaatgtgatgcccagatgttgttcgagttggcggatctgctggctgacggcggcggcggtcagcgccagcgcatccgctgcgcgggccaggctgccggtgcgagcggcggtttcgaacgccagaatggcgctcagcttgggcaagcgcgcacgggacggtgagtgcatgagcagggcttatcgctaagaattcgttagcttatccataacgtatttttgttatggcggcaatgcggcattcgctacagtgagaggcatccggctttcgcacacgaggggaacgtcatgccgccacttgccgatattatcgatctgtccgcccatcccatcgatgacgccgcgttccgcgcccgctgccgacaaacgctggcgcgcgccggcgcgctggtgctgccgggatttctgcgtgaagccgcgctggcgacggtgcggctggagggcgctgaacagcaccatgcggcgttttacgccaccagcaaacacaacgtgtatctacggccgcaggacgacgcgctgccggccgaccatgcgcgcaaccggctggtggtgtcgtccaagggctgcattaccgacgaggatattccgccgcagtcgccgctgcgcgcgctgtacgacgctccggcgtttcgcgcgttcctgtgtgcggtgctgggcgaggcgcagctctacccctacgccgatcggctgtcgtcgatcaatctgcattacgcccataccggtcaggagctgggctggcattttgacaactcctcgttcgccatcactctgctgatccagaaaccgcaggcgggcgggcgcttcgaatacgtggagaacctgcgcgacgccgatcgcggcgagatgaactatgccggggtcacgcaggtgctggacggcgagcgggcggtcaaacggctggcgatggaggagggggatttggtgctgtttcgcggacgcaacgccatgcaccgggtgacgccgaccgaaggcgacaccacgcgcatgctggtggtgttggcctacaatgcgcagccggacgtgatgctgtcggaaagcgcccgaatgacgttctacgggcggttatagcggataaaaaaaaccgccccggagggcggtttgtcgattcagcgttggctctgttcttcgtgagcctgctgttccagcttcacttcctgcgcgcgtttgcgcaggccgaaccagcccagcgtcagcagcaccgccaacaccggaatggtggcgatggtccaggtgccgttcgggtagtcgaaggccatcatcaccaccacgaccagcaggaacgccagcgtcagccaggaggtgaacggcgcgcccggcattctgaacgacaccggctgcgcgcggccttcgcgcacggctttacgcaggcgcatctggcaaacgatgataaacgcccaggaggcgatgatgcccagcgaggcgatgttcagcacgatctcgaacacctgcgccggcaccaggtagttgagcaccacgccgatcacatagatgccgcaggtgaccaggatgccggcgtaaggcacctgctggctgctcattttggccatcagcttcggcgcggagccgcccatcgccagtgaacgcaggatgcggccggtggagtagaggccggagttgaggctggacagcgcggcggtcaacaccacgatgttcatgatggtgccgatgtaaggcacgcccagcttgctgaagaaggtgacgaacgggctttggccggcctgataggcgttccacgggagcagcagcaccagcagcaccacggagccgacgtagaacaggccgatacgccagatcacgctgttgatcgctttaggcatcattttggccggatctttacactcgccggcggcggtgccgataagctcgatgccggcgaaggcgaagatcaccccttgcaccagcaccagagcaggcaacaggccgtgcgggaacatgccgccgttttcggtgatcaggtgcatgccggtggtgtggccggcgaccggggtgccggtgccgaggaagacgacgccgacaatcaggaacagcgcgatggcggcgaccttgatcagtgcgaaccagaactccatctcggcgaaccacttcacgccgatcatgttcatggtggcgacgataccgagcgcgccgagggcgaacagccactgcggcacgtcggcgaaggtgccccagtagtgcatgtacagcgccacggcggtgatgtcgacgatgccggtcattgcccagttgaggaaatacatccagccggcgacgtaagaggctttttcaccgaggaattcgcgggcgtaagaaacgaagctgccgctggaagggcgatgcagcaccagttcgcccagcgcgcgcaggatgaagaaagagaagatcccgcacaccagatagaccagcgccagcgccggcccggccaactcgagacggccgccggtaccgaggaacaagccggtgccgatggagccgccgatggcgatcatttggatttgccggttgcccatgcttttgtgataaccggattcatgagagtctagccagcgtcttctggcggcgtgtttgtcatccgccgactttttttgtgagtgcattatccgtcctgtttacctgtctatgttaaccctgctcttaccgagagcaaacgattgctatgaccaatcgtcatgagaatgaggtcgtggcatcattccgctgtttattgtgtatacagccatcattaaaataacggcgaagcatgctaccttttctccgtaatggtggcaaaaaatactgcgcataaaacgtgaacaagtgtgtttattttttaatccaaatataaaagaatatattattcaaaaagatgtgatgttttatcaagacggaaatatcgaggaataaaaagtgattaaaatcacaaaataataattaccgtgcaaattacagggtgttgttcttatatttcgcggtgagaaataaggggggaaggaaatggcgacccgcgcagaaaatgggataaagcagcgggtcggttggcgcgtaacgagtcttaggccgattcaccggccggcagtgccgatgcgggcagaccgaacagcttgtcgaatgcccagttaaacaggaaggtgtagcaaggaatgatgacgatcagcgccatatccagcagcagcgcctgccacagcgtgatgcccatccaccaggcgatcagcgggatcagatacaccaccagcgttagctgaaagccgacggcgtgcaaaatgcggcgtttgagcgtgcgggtgcgcgacacctggcggctttcccaccactcgaataaatagttgtaaataaagttccagctgaccgcgatggtggtgatcaccaccgccagcggcccggtgctgctcggcgcatggcccgacagcagcgccagccccagcgccgagatcgccatgccgatgatttcataagcggtgacatacaccagtttgcgtttgacgccttgcatcgttttctcccgatctgtttttagttgcctctgtggcgacggcggttaagataacgtcaatcacattgatagaaaaagtcaggagttgtcagttaatctgacaggttgaacaatgaatttctccagcgacaatatcgaactgtttttggcggtgctcgatcgcggctcgttttccgccgccgcccgcgcgctgcggcgcgtgccctccgccgtcagcatggccatcgccaacatggaggcggagctcggtttcgccttgttcgaccgttctcaccgtgaaccgacgccgaccgcgctggcgttggccctggcgccgcacgcccgcctgatcgccgggcagctcaagcagctgcaggtgcacgccatcgaactgtctcaggggctggagagtcggctttcgatcggcgtggcgtcggatatcaacggcgccggcctgctggcggcggtgaaaacgctgtcgcagcgttatccgctgctgaacatcgaagtgctcagcgcgccgcaggacgacgtgctgcacatgctgcacgaggggcgcatcggtgtttgtctggcgttcggcgggctgaacgtcaatagcgcggagcagttccacttcgtcggcgcggagtcgctggtggcgatgctgtcgccgcagcacccggcgctggacggcgcggcgggtgagctgtttctcgaggatctggtcaacgtgcggcagatcatggtggccagccgcgatctgccgatcggcgatctgcgtccgcaggtggcggaggcgtactggcgcaccgacagcctgccgatggcgctgaacatggtggaggcgggcctgggctggggcaacttcccgctgtcgctggccgagccgctgctggcgcaggggcgtctggtgcggctgaaattcaaaaacaccaagaacgagctgcgcttgccgatgcatttgatctggctgaagaatcgcccgttggacaaggcggcgcgcgagctggtcgagctgatgcgcgcggcgccgcaggaaagctgacgcccgctgcgtttgcttactccgggtggcgtttacgccaccagaagcgcaccagcagaatggcggcgatcgccagcgcgacaaacagcaggctggagagctttttgtcgaagccggtaacgaagcgttcgatcgcctggccgccaaaataaccgagcatgacgaagatcgtcgcccataaaatggcgccgaggatattgagcggcacgaagcgcgacggcggcaggcggctggcgccgatcaacaccgggccgatgatgcggaaaccgtacatgaaacgcaccccgataacgaacagcatcgggtggcgggcgatcagccttctggcgcgcgcgatgcgcttttcctgtcccttgagccgcgagatgacgcggccttcaaaccggcggccggcgaagtacagcagttggtctcccatcatgccgcccagcgccaccactgcgatcacccacggccagtgcaacagcccttcatgggcggcgatgccgcccagcagcgtgatggtttccccttccgccaggcagccgataaacaacgcccagtagccatagtccgtaatgtagtgggccaaatctgtcattccttactccttatgtggctgacgcataagggcaagtatacgcccgattgctaaccttgggcgatctgggccaccaacgctctgcgccgctgaaggctctccgccatctgcgcctgtaccctggcgtaaatgtgcggcggggccaattccggcgtgccgccctcgaacggcggtgccggggcgtattccagatagagctggatcatttgggcggtgtcttcgccgtgcagttcggcgatcagcgccagcgcgaaatcgatgccggcggtaacgccgccgccgctgatcacgttgccgtcgcgctctacgcgtgcagcgctgggtatggcgccgaacagcttcaggctgtcgcgcatcgaccagtggcaggcggcgcgtttgcccggcagcaggccggcggcggccaggatcagcgaaccggtgcataccgaagtcagatagcgggcatcggcgcccagccgccggatttgctgcatgaatgctttatcctgcagcgcctgggtgcagccgctgccgcccggcacgcacagcacatcgcagcgtgcgatctccggcagcgggcgcagctgggtgaagtgcaagccttccgactcgacatccgcgccgtctactgaagcgacgatgatttccgcgcccggcatgcggcgcagaaactgcagtgggccagtgaaatcgagctgggtgacgccttgatagatgggaaatacaatcacgagtggttcagacatgacattcgcctcatttttatcgttggacctgggccataatagccgccctgcatttggctgatatgacagataaccctcaaaaagcgccatcatgaaaacgatcggttttgtggtttttcccggtttcaacctgctggactttgccggcccgctggcggcgttcgataacgtcaaccagttcactgacccgccggcctaccgctgcgtggcgatctcgccgcagggcggtatggtcgccagctcggccggggtggaaatcgccacgcagccgtgcggcgacgagcgtttcgatacgttggtagtggccggcggcagcggcaacgtgatggcggcgcagtcaccggcgctggtggcgttcctggccaaccaaagccgacgagcgcggcgtatcgccagcgtatgcaccggggcgtttattctggcggcctgcgggctgctggacggcaaacgcgccaccactcactggtatcatgcggcgcggttgcagcagagttatccgcgtatccgcgtcgacagcaaccgcattttcatccgcgacggcgatatctggacctcggcgggcatcagcgccggcatcgatctggcgctggcgctgatcgaggacgatctgggcgccaccctggcggcggccgtggcgcggcagctggtggtctatcaccgccgccccggcgggcagtcgcagtactcgctgctgctggcgttgaacccgtcgtcggatcgcatgcgcgccgcgctgtcgtacgcgcgtgaacatttgcaccagccgctgtcggtggcggatctggccgacgccgcctgcctgagcgagcggcaattcggccggctgttccgcgctgaaaccgggcagacgccggccaaggtggtcgagcaattgcgggtagaggcggccagggtgcgcatcgaagagagcgccgagccgctggaagcgatcgcccgctcggtggggttcagcgatccggaacgcatgaggcgggcgtttatccgcgtatttggcctgtcgccgcaggcgatccgccggctcggccgcgcgggataacttttttgccacgcctggcggcggggtacaccagaggagcaacggatgtatcaggattttgacagtgaattgagctgggcgatgcgtcatatgccgcgcacccgggcggcggtggcggcgttgccggacctgtacggggtgcggctggcgtgcaatatgcacctggatctgaaaatggcgccgctggtggccggcctgctggacaagggcgcggcgatctttctgaccacctgcaatcccactacggtgcaggacgacgtggtggcctggctggaacggcggggcgcgcaggcctatgcctggcgtgacatgagcgccggcgaatggtcggaatctttcgatcgcgcgttggcctggcagccgacccacctgtgcgaaatgggagcggatttgaccacccgtttgcaccaatcgccgaacggcccgcagatcgtcgccgggctggaggccaccggatcgggcatcaatcggttaaacggcgtggcgccgcgctacccgatcttcaactgggacgatctgccggtgaaagaagggctgcacaatcggcatatggttgggctgaccgcctggcacaccttcttccagaccacccatttgacgctgcatgaaaagcgcgtgctggtgattggctacggcctggtcgggcaggggacggcggccgcggccagggcctacggcggccaggtgatggtggcggaaatcgatccggcgcgtgcgctgcaggcgcgttatgacggctggcaggtggtggatctggcgagcggggtcgcgcaggcggacgtgatcgccaccgcgaccggcgcgaaaaacgtgctttcggcgcagcatctgcaacaggcgcaggacggcgtatttattctcaacgtcggccacgtggcggaagagatcgacgtcggcttcctcaagggcctgcagcaccacgagccgatgcattatgtgaacgcttaccaactcaatgagaagacggtttatttgctggccaacggctcgatgttcaacctgaccgccggctacggcgacagcctcaacgccttcgacgtcacgctggcggtgatggcggccggcatcggccatatcgtcggtgcaggggcgcggcaaacgccggggttgtacctgttgccgcagtcggcctggcagccggcgctgtaactttttctacgcgggcgttcatcccagagcgcccgcgggctgtgccgattttcggccgacagaatttgtcacaaatccgccctataatcccagtgccaagcgctgaaccctcacatataattcgctgagttcaagcccccatttcagagtaatgcctgtgaaaatacgtgttttggttctgaccctgctcgctttgcaggcgggcgcaggctttgcgccgcgcgcgctggccagcgacaacgctgccgccctgcacgccacccagcctgagctggcctccggcagcgcgatggtcgtcgatatgcaaacccataaggtgatgtacgcgcgcaacccggatgaagtggtgccgatcgcctcgatcaccaagctgatgaccgccatggtcacgttggacgcgcacctgccgctcgacgagatgctgtcggtggacatccaccagacgccggagatgaaaggggtgtattcacgggtgcggctgaacagcgaaatcagccgcaaggatatgctgctgctggcgctgatgtcgtcggaaaaccgcgcggccgccagcctggcgcaccactatccggggggctacaacgccttcatcaaagcgatgaacgccaaggccagggcgctgggtatgaccaacacccattacgtggaaccgaccgggctctctattcataacgtgtcgacggcgcgcgatctgaccaaactgctgatcgccaccaagcaatatccgttgatcggccagctcagcaccaccaccgagcgcatggccagcttcaaggatccgaactacacgctgccgttccgcaacaccaaccatctggtgtacaacccgaaatggaacattcagctgaccaagaccggcttcaccaaccaggcgggccactgcctggcgatgcgcaccatgatcggcaaccgctcggtgtcgctggtggtgctggacgcttttggcaaatatacccacttcgccgacgccaaccgtctgcgcagttggattgaaaccggcaaggtgacgccgatcccggccgccgcgcgtgactatcgccgccaaaaagacgcccgtctggcgaagaacgacagcgaataacccgcctggcggtccgcccgtttgcggcgggccgctatcggccctcgggccgtctgatgacaaatccccgctcgcgatcgccgtcgaaacccgctttgagataaagctggtgcgcgccggtgcgttgctgccccgacagcagcatcaccttgtaacagcctttacgccaggccagctgcagcgcatattcgaccatcgcgagcgccacgccgtggccgcggtagggctccgccgtcaccacgtgttcgatgacgccgaacggctgcgcctggtgcgccagccccgggatcagcgccagcatgcaggtggcgatcggctgttcctcgtccgccgccaccaccaggcggatcgccggatcgtccagcaggcgttgcagggcgcggcgcgcgtcgtcggcgcgcagcggcgcgtcctgcgggcgcagctcgcgatacaaggctaacaggccgttgagatcgtccggctgcgccaggcgatgaatgatgctcatgattgctcctttccgccgcttcaacggtaatccgctatcctccattaataccacaacgattgtcggaggggatgttatgagtcaggtttcgacctttgtcatgttccagggagaggcccagcgggcgatcgacctttacagccaggtgttcgagcgttttcggctcatgcaggtgcagcattacgatccgacgccggacggccggcggttgatcaagcatgcgtccatcgatttcgaccggcagaacctggtgttcatcgacagcccgatcagccatgacttcagcttcaccccggcggtgtcgctgttcatcaacctgcctaacgaagaagcgttggagcgggcgttccaccggctggcggaaggcggcaaggtgctgatgccgctcgatgactacggcttcagcgcccggttcggttggctgaacgatcgtttcggcctctcttggcagctcaatgtgccggcgggcgatctgccctgacgccaagggcgtgcaaaagggatggtagcgcctgcggttgtttcatatgcttacccccgtggtggcagggagttctgccgtgggcaataccgacaacatcatggaaaggtgcgctttgattgattttgaccgctatgttgagcaagcgaagtcttacggcgagtggtcgggcgggcatgtggagatgtcgtccggtcgcgttgagggattgagctatcgcctgtatcggcaaactgccgcgaatgaagacgtgatggtggtgtatcacggcggcggggttaacagcgccgccgggtatgacgtcctggcgcgccagctggcggccgagccaacgctcgcggtgtgcctggtggatatccgcggacatggcgattccgcgggagagcgggggacggttgagcggcctgagcgtatttggcgcgatgtcgatgtcatcctggcggaaatgcgccgccggtttccgttggcgcgcaggcacctgctgggccattcgagcggcgccgggatgttgctcaactacctgacccgctatccttgcgagcagcaggcggatagcctgatcctgctggcgccggagctggggccattttccgggatggcccgcgatctggcggcggcggcccgttttgctcaggtgcgccaatggccctttgtggccaatgcgctcagcggtgggcgatggttcgggcaatctcgggcggtcagcctgaattttcccccggccgtactggccgcctcccccgattttatctgccaatacagcgttaatatggctaacgccttgacgcctcgcgccccggccaagcaactggcggcgctgcgattgccaaccttactgctggcggccgcgcaggacgagttgttcaatgcgcaagcgatgcagcgtttcgttgaacagcatggcagcgtgcatgtggcatttggtttgcttgaggggagtacgcatttatcgtgcgtctttgatgcccatcgccttgtccttcaacatatctcgcgtgtgtccgctatcggatccgatgaggggctggcgggcgagggggcttaacgtccacccggcgttttccgcgatcctcccatatccttttatgacgctttaccgctatgctaaacatagaatggcccgtgaatatgaaaaggatgaatcattttggcaggaagtagtttacttacccttatcgacgacatcgcctcattgctggacgatgtctctttaatgagcaagatggcggcgaaaaaaaccgccggggtgttgggggacgatctggcgctcaacgcgcagcaggtcaccggcgttaaagccgaccgcgagctgccggtggtgtggagcgtcgctaaaggctcgctgatcaacaaggcgatcctggtgccgttggcgctcttgatcagcgccttcgcgccctgggcgattacgccgctgctgatggtgggcggcgcctacctgtgttacgaagggttcgaaaaggtgtttcacagcctgagccacggcaaggcggcacaggaggaaaaatcggacgggcccggcgccaatgaggatgccgcagcctatgagaagcgcaaggtgaaaggggcgatacgcaccgattttgtgctgtccgccgagattatcgccatcaccttgggcacggtcgccggcgccaccttcagccagcaggtgatcgtcttgtgcggcatcgccgtcgtgatgacgctcggtgtgtacggcattgtcgccggcatcgtcaggctggacgatctggggctgtacctgagccgcaaaggcagcgcgttggcgcgcgccatcggcagcggcatcgtgcgcgccgcgccttatctgatgaaaacgctgtcgatcgtcggcactgtcgccatgtttatggtcggcggcggtattctgacccacggtctgccgccggtgcatcacctgttcgaagattgggcctcgtacaccaccgtggtgccgacgtttggccatcttttgcagggtgtggttccggccctgctgaacgtggcgttcgggctggtggccggcggcgtggtgctggcggtggtatcggcgctgggggcggtacgcgcgcgtttcaaggcatgatgaaaagtctcgccccggaaggggcgggacgtattaagcgcattaaaagatcagtttgagaacgccggtaatcgtcaacaaacccacgataaagatgatggcgactatccacagaataattttcatttgattctcccttaccggttaaaggtggcgtgcgattggcgctaactcaatgaaatcactcttcactatagacgctaactccttatcgtgcgtcgccatgccttcaaggatgctgattgtcgcccgcgcccagcgcgcgctgcatgatgtgggtgtcgcgccattcccccagcttgaatcccacggcctttaacgtcccgacgctggtaaagccgagcgactggtgcagcgccagcgagccgcggttggcggcggaatcaccgacgatcgccagcatctggcgccaggggccttgctcgcagcgggcgatcagtgcgctcagcagcgccttgccgacgcctttgccctgctgcccttcggcgatgtacaccgagtcttccacggtaaagcggtaagccggccgggggcgatacggcgtggcatagcagtagcccacaatacggccttcacttttcgccaccagccagggcagtccggctgcttgcaccttggccagccgcagctgcatttccgcccgcgtcggcggttgttcttcaaacgaggcggctccgtgcagcacgtggtgggtgtaaatacgctgcacggcggccatatcgtccggcgtggcgtcaaggaggctgagtacgggagcggagagcgtcatggcgggtctgtttaccttgaaaatcagtggataaacgccattatgcgcgccgcttgccgccggggtaaatcgggttttcttatggtgagataagaaaaccctatggggtcgtcaaccgcgcatcagccgggtcacggcctggcgcagataggccagcagcggcggagtcagccaggtgccctcggtcagcgagggttcccgttccatcgcttcgcggatcttcatttgcgtcgccgggttggtgcctgcataggattggaacagcgccagccaactggccgccaatcgcactgcctccggcgaatcggacggtatgccgtcgttcatcgcttgatggaattgagcgatcagagccggccactcctgcaggcgggtgaaatagtgttgacgcacataggcgtactcttccgccgacaggtatttttgatagacagccagcttggtttcggcaaaggcgcgggtgatgtagtccgtcatcgtcggtgtaatgccggtctgttcgcgcatcgacggttcgtcggcgtgcatggcgttcagccgggtgagaaaggccgggttgccggcggtgtcgcgctccagcatcagcatccagcggcgcgccagcgcctgtgcctgtggcgcctgaggttcgacgccttccgccatcagttgtcccacgctgctcaccaatgcagcccattcctgattgcgggtgggatcggcctggtagaacggcagttgcgccagctcatcggcggtaaagtatttatcgtacatggtcattaactccaacgtagttagccagtcgttcagttctggttcgtgcccggcggagagttgggcatgcatgtattgcagccggccgcgcaatgcggcgatctgtgccaactgctggtccaacatggcgatctgctgctcaatcaccgccggaagcgccagccctgaacgcgccagaattgccccgacttccgccagcgaaacgcccatccggcgcagcgcctggatgtggtgcaagcgggtgatgtcagcccggttgtataaacgataaccggcgtcggaacgcgcagaagggaccagcaagccaatgctgtcgtagtgatgcagtgtgcgaacggtaatgccggaacggcgcgccagttcgccgactttcaataacatatgtagctcctcccttgtgcgtgccaggatactaaagcctgacgccacgtaagggtcaagagcgggaagaaaagatgacgttttaaaaatcggtgggcgcttgataggcaaaagcccagctggatggctgggcttcgcaggtccctgaaagggagggtatagcataagggcctttatcggctacggcgacaatttcacctgatttgtctgttttgtcaacaacagcgtactggtcagaacagcatatttttggcattgatcgacttaatgacggcgcgttgtatgtcagcaacaagctcgcgcgacagacactgggtaagaaagcctctctctttacgggctctgttcagccgttggcggctgacttgctgcaccagatcgccctttgcccagcgggtttgcggatgaaagaatctcatatcttcgatgagttcacgcgtaatttcgatgtgcaatccccgttcgatcttgttcgaatctctggtggtcgacagcggtacgataatgcaggcgttgccgttaattttgccatttaacacaacaactaaacggttcttcaccatttctggtggaatgtggccatcataaaagccggcttcatgcggttggcagactgataggggatagttgccatagttgcactcaagaatttccccgaccttgggggcaaatttgatcggcatcgagacactcctttgttgtgaacaatccgtgttatggaggaatgagcatgcgggcgttttgcttttagagaaaggtgtggcgtaaggaaacggggaatgaaagtgaaatattgcggattcgtacgcagaatccgccttgatggtggccgaatttaccagcctttcaccgcgccgccgttgaagattttttcggcggctttggccacttcatccgactcataggccttgatgaagttctgcacgttcggcgcgtccttgttgtcttcgcgggtgacgatgatgttggtgtacggcgagtctttatcctcgatgaagatgccgtctttggtcggcgacaggccagtctggttgatgtaggtggtgctgatgacggcgacggtgactttcggatcgtccagcacatgcggcaactgcgcgccttccagctccatgatctgataacgatgcgggttggcgctgatgtccagcgcggtaggcagcagccccttaccaggcttcaggctaatcagcccggttttttccagcagcagcagggcgcgccccaggttggtcggatcgagcgggatggcgatcaccgcgccgtccggcagctctttcagcgattttatctttttggagtagccggccatcgggaagacgaaggtattgccgaccgccaccagcttatagccgtgatctttgttttgctgttcgaggaatgggcggtgttggaacacgttggcgtccagttcgcccttgtcggtggcgtcgttcggcagcagcgagccgctgaagccgaccagctcgacgtccagcccgtatttctctttcgccacctgcctggcgacttccgccacgtcctgttccgcgccgttgatgacgccgactttgatatggttttggtcggttttttgatcgcagccctgtagcgccaatacggcggcgaaggccgccgccagaggggtgatacgccagcgtaaggtcatcgaactctccctgaaaagaacaataaaatcagttggtttttgttcttacagctaagcctgaaccgccgatgaagtcaaacgctcgttcagcataaacggctatagcttatagccgttatgcagcggggagttatcggctgagcgaacgcagcacgacgatgcccggcgtagccatcacgtaatccataaagggcgaatcgaccacccgcatgttggctttgcgcgaagaggcgttgcgcagcaccgggccgttgtcggtcatcacgaagatgccggtgtgggtcacgtccagcccggcgaggttggtgtaaatgccgatgtagtcgccggtgcgcagttgggccagcaccttgtcgtcgacgcggtcgctgggaatgtaggtcacgctgcgctgcacgacgggcaagccgggcaggtagctgccgccgtcggctttctgattgaggtttttcacgaggctgacggcgtgtgggctgagctgggcggtgatgtcttcggccacctggtgcggccgttgcacccagtcggtgaagaagtgtttgcgctgcgggaaggcgattttgccgtcgacatagcggatgtccactaggcgctgaacgaactcggtctcgctgcgggcggtgctgagtgcttccacataatcgatgtaggtgaagcaatccagcccgcggaagtcgatcaccagttgctcgggcgtgctctgcgagccgatcaggcgattggcgaggtagggggtgccgagaaactcgcgcgaaatcaaatcgacggtgcggccatgtggctgcgcggcgggccaaccggcgcgcagcgtgaggatctcacgcagcttgctgcgggtgctggcgtccatctccggctgcacgctcggcggcgcaacggcggcgtcggtcggcggcgttgccggggtggggcgctcggcgcatccgctcatggcgatagctaacatcagtaaaacaaccttgttctggttcatacggccctccatgggtgtcgctggcttatcagagtaagtgataacagttctcatccgatggtaggggttaaaaagtaaacatagcctcaatggcaatcgataaatcagtaaccgatttcgctattgaacggcaaataccagaacagcgcgatttcgtgatcggcgatctccggctcggcgcggtacagcaaacgatcgatgccgccgagaataaacccgtaatgctggtagcagcggcaggccgccagattgttgttctgcgtttcgagcatcatacccgaggtttcctgctgccgcgcccactgtttggcgcagtccagcagcgccccggcgatgccctggcggcgcgcgtcagcgctgaccgcgatctcgtcgatcagggtgtagccgttccagtttttgctcagcgtgatgtggccaacggcgtcgtcctggcgatacgccaggaaggtcacgctgtcttcgttggcgaacggcgccagcggatactgcttgcgaaacggcgccaccgggcgggttggccagctgtcgaccgggctgtcgaactgcggcagggcgtaacaggcgatggtaaagccgaaatcgccgcgcgtcaggtaatcatcgggcagcgcctcaatggccgcgatgcggatggccgggatcattacggaagctcccgcagcaggcgcgccggattgccggcataaatccccttgcgggtgatgtcgcgggtcacgaccgccccggcgccgattaccgtgtcgctgcagatctccaccgccaggatcgtggcgccggagccgatggacacccgatcgccgatgcaggtgcgcctccagctggccggatcggcattgggcgcgccgtctttgaacagatcgttggcgaaggtgacgccgtggccgacaaagcacgcttcgccgagggtgacgtattcgcagataaagctgtgcgattgaattttactgcgcgcgccgatgctgacgtggcgctggatctcgacgaacgggccgacgaagacatcgtcaccgagccggcaaccgtacagattgcagggttcgatcacggtaacgttgcgcccggcttcgacgtcgacgatccccgcctggcgggtggtgataacggatgacatgaccttcctcacagcctggttttcatggtgggagtataagacaaagcgccgcggcgttgcgctttccgcacgttttttcgccgaaagactataatgagtacaggggagagagccccgtggccgcaatcctcgcacgggtagcagtccgtcagaggtgtgaaattcgttcgccgatcgcggcctacggcgagattggaggtgtctcatggtcagtcatgtttggggacttctggcgcatcccagcgccgagttcgaacagatcaaaagcgagaatgaaagcgtctcgcacctatacacccatcacgtgttgctcttggcagccatcccggtggtctgcgcctttatcggcaccacccagttgggctggctctccggcgagggacatgccatcaggctcgacatgtttaccgcgctttataccgccgtggcgttctacctgctgatgctggcgggcgtagcggccatggggaaagtcattcactggatggcgcggcgctatgaatcgcgccccagcctgcaccgctgcatggtgttcgccggctacgtggcgaccccgatgttcctcagcgggattgtggcgctctatccggtcgtctggctgtgtctgtttgtcggcattatcggcctgtgctattcgggctatctgctgaatctggggatcccgcacttcctgaatatcgacagtaaggaagggttcatcttctccagctcgaccttcgctatcggcatcctgttgctcgagctgctgcttggggtgacggtgctgctgtgggggtacggttcctggttattctgagttaacggctgttgttgtcgcccccgcgccggtggaacggcgcgggggcttttgcttttatgcgcggcggaaaaccagcatcacgccgagcacgatgcccgccatccccaacaggctcagcgcggccagcgcgtggccgagcagcagataatccagcagggcggtcaccgccgggatcagatagaacaggctggtgacctgcaccaggttgccgcgctggatcaggcgatacagcaagaacgtcgccagcaccgagatcaccaccgccatccacagcagcggcagcacgaactcaggccgccagtcgacccgcagcggctcaaacggcagcgccagcgtacacatcaatagcccgatggcatactgcagcggcaagaccgccagcggcggctgcgtcatgcccttttgcagcagggtaccggcggtcatgctccccaatgcgataaaggcgaacagcatgccgctcggcgagaaatgagccaccatcaggctttggtacaccaccagcgtcagcccggccatcgccagcgccagcccgaatgcgcgcagcccggtgcagcgccgttcggtgatgaactgggtgaggatcggctgtacgccgagtaatgtggccagcacgccgggcgtaatgccctgttccaacgccagcagatagcagatctgatagctgccgatcatcaacacgccgatcagcgcgacgcgccggcgggtgccgggggcgggcaggcactggcgccgccacaggccgatggccaacagcaccgccagcgcgatggcgcagcggaagaacagaaaagcgaaggcggaggcgtgctccaatccccaacgggagaagatcgcgccgctgctccagagcaggacgaacagcgtagccaggccggcattggcccagagagaaggtaatcgcatatcaatttcacctgtcgtgaaaattacaggctccggcgcgcgcggcggtctacgcctgaacgcaacagatcactaagccggaggtaaaaagtcggtttggcttaacgcacaaccacaaggcgtggcgggtaagcggcaaccgcagaaacgacagaagaaacggcgggtggggcggaggaagcacacagcaaaacgacggccggaacggtcgcgtttgtcggatctgtactgtgcgccagataggtcatgtgagttcctgaaaatcgggaatgagacgaatcgcatcaaacataaccaagttcagcggggcgtgcaatcggaaatcacagagattttcatgataatgaaaatcattatcatctgtaaaaaggtgtgctatgttgctttaaccacgccgttttgaagcagggcgcggcttgccctctgccttgcttcacgcagcgcgtgcggcataagaatttgcgattcgcttttgcagaaggcgagcaatcgtggtaaaaacactgatatgttataatataacaatttatgcatgatgaattcagctcacgacatcctccatgttgatggagttagcctgaccggacacggcggggcattgatactcgacaacatccatttcgcgctccgcgccggtgagaagctggcggtgattggccccaacggcagcggcaagtccagcctgttgcgcaccctgatcggcgaaacgcgggcggacagcggcggcatttactggcgagggcgcgccttgtccgcgtggccggcggcggagcgcgccagaagcatcgcctttctggcgcaaaacgatctgccggatttgcggctttcggttgaggattacgtggcgttgggccgtttaccgcatggcgaacgctctgcgacgggaaagcgcatcgttgatgaggccatcggggaaaccgggctggcgccgttcaggcgccacccgttagggcggctctcgggcggccagcgtcagcgcgccgcactggcccgggcgttggcgcagtctcccgacctgttgttgctggatgaaccgaccaatcacctcgatccgcccgggcgctcggcgctgttgtcgttagtgaaaaataaagatattgccgtgattgcggtgctgcacgatttgcccgtggcggaggcgtttgccgatcggatcctggtgctcaacgaaagccgccaggtagcctgtggtacgcccgaggcggtgttgcagaccccggttattctgccggtgttcggcatgaacagtttcaaggtggcgcaccccgtcagcgggaaaacgctgcgtatttttgacgttccccattgtgcttgataaaccagagagaaatatgaacacacgcgtattccccctgctcctgctgctggccggtggggtggcggcggccgaaaaatttcccgtcaccgtagacagctgcggttcgccgatcgccttcaaccaggcgcctcaacgcgccgtcatcaacgacatcaacatggccgagatggcttttgcgctccatctgcaggatcgcattgtcgggctgaccggtatcaccggctggtacaaactgacgcccgacttcaaggcggcgatgggtgccattcccgaactggcgccgaaatatcccgctttggaaacgttgctggctgcgcagccggatttcttcttcgccggctggaattacggcatgaagatcggcggcgacgtcacgccggagaagctcgccccgttcggcatcaaaacgctggtgttgagcgagagctgcgtgcaggccggcgggcggccgcagaaggccgatatgaacctgctgtatgacgatgagctgaagctcggcaagattttcggcaagccgcaagaggccgccgcgctggttgaaggctggcggcgccggttggctgcgcttcccgccagaccggcgggtcagccaccgctcaaggtgttcgtctatgactcgggggaggagaagccttttaccagcggcaaatacgccatgccgacggcgatcatcgaagcggcgggcggccgcaacgtgatggacgatttaccggcgagctggacgacggcgtcctgggaggcggtggcggcggccgagcccgacttcatcattctgctggattaccagaccggttcgggggccgatgcgctgcggcgtttcctcgagtctcacccgttgatgaaattgacccccgcggtacggcaccaccgttatctgaaactgcagtatgcggagctgacgccggggccggccaacatcggcgcggtggaaaagctggcgcgggcgctgtacgcgccggaggctgaatgaactcgccgacccggcgatttatgctgctcgcgccgctggcgctgtcggtattgtgtgggctaatgatctggagcctgcagctgggcagtgtcgcgctgtcatggcggcaggcgttggcggcgttagggctcggttcggcgcccctctccggcatgctggataccatcgtcgtgcaactgcgaatgcccagagccctgttggcggcgttgaccggcgccgggctggcgatgaccggcgcgttgctgcagactaccacccgcaatgagctggccgatccttttctgtttgggctctcctccggcgcctccgccggcgcggtgctggtcatcacgcgcttcggcgatgcgctgggcgcgctgacgttgccgctgtccgctttcgccggcggcattttgtccgcgatggcggtgatgatcctgtttcgcgtcagccgggtcaggcgcgccgagcagctgatcgtctgcggcctggcggtctcgtttttgttcagcgcgctcaccagctacctggtgttttccggcgatcagcgggcggccggctcggtgttgttctggtcgctgggcgggctggggctggcgcgttgggataatctgttcattccgttggcgagtttcgtgctgctggccgggtttacggcgctgcgttggcgggcgctggacgcgctgctggcgggcgagcacaccgcccattcgatgggggtcaacgtcgcgcgcctgcgcaccgagacctttctgtgctgcgcactgtccacggcgtttctcgtttcgctgacgggcgtgatcggttttgtcgggctgatggtgccttatctggcacggcgcctggtgggcgtgcgccaccgcttgtccgtgccgatgtgcggcctgctgggggcgatgctgctgaccggcggcgacatgctcagccgcagcctgatccccaatcaggagctgcccatcggcatcattacggcggggctggggggcgcgttcatcgtctccttgctgctgcgtgcggaacgctgaatgggccattgaaggtcaacaggaaggtgaggtggcccgcctcggcaggccaatcgggcgctcttagcgggggtcttcggcccagcctttgcgtttgctggttttgccgatgccggggttgaagctgttggtcggatcggcagtgcggtagaacgcctgcagatccggtttggcatggtacaggtggccgacgttatgctccgccgggtactcggcgccgcgccggttgaggatctcgagcatcttttctttcagcgcatggctgtccacgccttttttcaccacgtagtcctggtggaagacgtggcacataaagtggccgtaatacagcttatgcaccaactgactgtcgatctccggcggcagcgtttcgaaccagtcggtgtcgttgcggcgcagggcgatgtccagcgccagaatatcctccaccttgtcggcgtgcaccgcgtggtagcgcaccgcggcgccggcggcggcgaagcggtgcaggaaagcctttttgccttcgtcaggggtgcaggcgaagaaggcgccttcggcctgggcgaaatagtcggtcaggtagcgctgcgcttcgtcgacgccggggccggccatcttcagcagcaggtggtgttcgaaacgttcgcggtattccttcatgcgcttcggcaggtggctcggcgccagatggctcaggccctgcatcagccgatcggtcaggttgtgcggcagcagcggcagcttgttgaggctggcgtccatgcggcctttcagggtgaagaagcgcggcatctgatcggtgccgagcttgtcgatcatcatgaaggtgtctttgccgtacacctcggcgatgtcgaagatatcgcggtgcatgtattcaccggccaccggcaggttttcgaatttgctcagcatgtggcggcgcagttcggtcagcaccgcggtgtcgttggtgccgatatagaacacctgctctttgccctctttctcgaaggtgtcaagccgcaccgcgaacactgccagcttgccggcgcagccggaagcttcgtacaggcggcgtttgtcggcgttgaagcgggaaggggtgtcggcatcgacgtcgcgcacccggctggcgtattcgttatccgaggcgcgcagctcaccgtattcgacgtcctccgggcgatagtcgcctttttccagccgggtgaggatctcttccggcgtgtcgccaagccggatgcccagatggttcaccaggcgcagctggccgtcttcccctagctgggcgtacagcgccatttcggtataggccgggccgcgtttcaccagcgagccgccggagttgttgcacacgccgccaatcaccgaggcgccgatgcaggaagagccgatcaccgaatgcggttcgcggccgtagggtttgagcaatttctcgaggtggtgcagggtgctgccgggaaaaccgaccacctgcttgccgttgtccagcacctgaatatggtcgaggcgcagggtgctgacgatgacgatatcacggtcatagtcgttgccgctgggggttgagccttcggtcaggccggtattggcggcctgcatgatgacgattttgtcggcggccacgcaggcctgcagaatgcgccacagctgcagcaggctggtgggaaacaccaccgccagcgcctggccttcgccggagcggaagcccttgcgataacgctcggtgttgcgatcgccggtcaacagctgcgggccgccgacgatgtccttgagctgattgataaacgtctgattgcctgactgcatgctgcctgtctccctgtcatccccgtcgccttaaccgcggcgccggggtgccgcgcaataagctaagaggttatcaattaaataacttattaagctatcagcttggtgggctaatggcttgcgggtttagtagcgctcggcgtagccggcctggcgctcttcgtcgcgcagcgtcaggatctccacgccgtcggcggtgaccgccacggtgtgctcccactgcgccgacagttttttgtcgcgcgtcaccaccgtccagccgtctttcttctgcttgatgcggcggtcgccctggttgatcatcggctcgatggtgaataccatgccttcctgcagcgccatgccgctgccgggttgaccgtagtgcaataccgccggctcttcgtgcatgtcgcggccgatgccgtggccgcaatactcccgcacgatgctgtagccggcctgctcggcgtgccgctggatggcgtggccgatatcgcccagggtggcgcccggtttgaccgcgcgaatgccctgccacatcgattcatagacgttgttcaccagccgtttggccagcggcgtcacctggccgatgcagtacatcttgctggagtcggcgatgtagccgccgttttccagcgtgatgtccacgttgactatcatgccggaacgcaggattttgctggccgacggcacgccgtggcacaccacgtcgtccacggaggtgttgagcacaaaggggaaatcatactgccccttgctggccgggcgcgacttcagctcttcgacgataaacgcctcggcgcggtcgttgatctccatggtggagatgccttcgacgatgacctcatcgagcatagcaaacactttagccaacagagcgccggaatggcgcattttggcaatctcttccggcgttttaatcacaatctgtttcacccgacaatctccttcagcgtcagcgcgttatctttcatcattttttttaccagctgcgggtaggtcagttccggatggaactccgccagcatgccgatcttgatccagtactcggcctgcgcgttgatcgaacgcgtcatagtcaggctggcgaggcgcagatcgtcatgcagcgcgtccgaaatttttacgatgcccatcggcgtctccataaattaacaatatacgaagtgtatacgttttggatggtcgcgatgtggcattctgtggcgtaagaagattctggcaacaacgattgccgccgccaggcaatgcgtttattgtgataaacgacttttttgccatgatttttcagaaggatttaaggcgtgactaaactacgtgttggggtgatttttggcggtaaatcggcggagcatgaggtgtcgctgcagtcggccaaaaacattgtggatgcaatcgacaaagagaagtttgacgtcacgctgctggggatcgacaaacaggggcagtggcacatcaacgacgcctccaactatctgctcaatgccgagaacccggcgctgatcgcgctgaaccgctcgaacaagaacgtggcgctgatcccgggccaggaaaagcagcagctgatcgaagcgggcagcgccggcgcgctggggcagctcgacgtcatcttcccgatcgtgcacggcacgctgggagaggacggctcgctgcaggggctgctgcgcatggccaatatgccgttcgtcggcgccggagtgctcggctcggcggtcagcatggataaagacgtgaccaaacgcctgctgcgcgacgccgggctggcggtggcgccgttcgtcaccctgacgcgcgccaaccgcgccgggttcacgtttgagcaactgagcgagcgcctcggcctgccgctgttcgtcaaaccggccaaccagggctcgtcggtcggggtcagcaaggtggaaaaccgcgccgagtttgacgcggcggtggcgctggccttcagtttcgatcacaaagtgctggtggagtcggcgatcgtcggccgcgagatcgagtgtgcggtgctgggcaacgacgatccgcaggccagcgtatgcggcgagatcgtgctgagcgacgccttctactcctacgacaccaaatacatcaatgagcagggcgctcaggtggtggtgccggcggcgatcgcgccggaagtaagcgaccacatccgcgaggtggcgctgaaggcgttccgcgcgttggagtgcttcgggttggcgcgggtggatgtgttcctgacgccggacaaccaggtggtaatcaacgaaatcaacacgctgccgggcttcaccaacatcagcatgtatcccaagctgtgggctgccagcggtgtcagctatcaggcgctgatcacgcgcctgatcgaattggcgctggagcgccaccagcaggatcgcgcgctgaacagctcggtgttcgatcgctaaacgcggcagggggcggcggtgccgcccccgtccatcacttcaccgtcacgtcgatgtcgccgaaatacttcttcgacagcgccgccaccgtgccttgctgtttcactttggcgatggcggcatccagttttttcttcagcgcctcatcccctttgcgcaggccgaaggcgataccttcaccgaggattttgtcgtcgcgcaccgcctcgccgacgaaggcgaagcccttgccgtccggctgcgacaggaagccgctttgccccgacggcgccatcaccagcgtggcgtcgagccgaccggccgccagatcgagataaacctgattctgatcctggtaagacaccacatccacgcccgccggcgcccagtgggttttggcgtagatctcctgaattgagccttgcagcacgcccacgtgtttgcccgccagcgctttggcgtccggcagcaggccgctgtcggccttggcgatcaggcggttcggcacctgatagatggcgtcggtaaaggcgatcgcctggcgccgctgttcggtcacgttcatcgccgagttgatggcgtcgaacttgcgcgcctgcagcgccgggatcaggctgtcgaacgaggtttccacccagctgcattgcaactgcgcggcggcgcacaccgcgtcgcccagttcaatgtcgaacccttccagtttgccgctggcggatttggattcgaacggcggatacagcgcttccagaccgaagcgcaggctgttttccgccgccagagaagagccggcggccagcaggcatccggcggcgaacagcgttttcaaagctttcataggcagtgcccctttcccatggtcggacaaaaaattacacctggttcaggcggcgcgcgccttccagcagggtctcgttatctttggaaaaactcagccgaataaggccggtatcggtgccgtcgctgtagaacgccgacagcgggatcgtcgccaccttcgcttcgcggatcaagcgcacggcgaaatcattgtcgctttcgtgactgaagccgctaaagcgggccagcatgaagaagctgccgcggctgggcagcagctcaaagcgcgaatcctgcagggcgctggccagcagatcgcgcttttgttggtaaaacgccgccagccccaggtaactctgcgggttggcgagcgcggcggcgaaggcgtgctgcatcggcgtatcggcggagaacaccatgaactggtgcaccttgcggatctcgtccatcaacgccgccggcgccaggcaatagccgacgcgccagccggtgacgtggtaggttttgccgaacgacgacacgatcacgctgcgttccgccaactgcgaatagcgcgccatgctgtgatgaatttcaccgtcgaacaccacgtgctcgtagacctcgtcggacaggatcacgatgtcggtgtcgcgggtcagggcggtcaggcgttcgatatcctgcgcgtcaaacaccgcgccggtcgggttgtgcggcgtgttgacgatgatcatgcgcgttttgccgttgatggcggcggccacttcgtcccagtcgacgcgaaaatcctgcagcgacagtttgatcgccaccggcgtggcgccctgcaggcgcacgatcggcgcatagctgtcgaacgccggttcgaaatagatcacctcgtcgccgggatgcaccagcgcgctgatcgccgagtacagcccttcgctggcgctggcgatcaccgtgatttcttcgtcggcgtcatagcgcgcgccatacaatcgttcagctttttccgccagggcagcacgtaacgccgccacgccgctcatcggcgcgtattggttatgacctgcgcgcatggcttgcgccgttgcctcgatcagctgcgggtcaccggcgaagttgggcgcgccctgcgacaggttgagggcctgatgttcggcgctgagttggccaatgacggtgaagatagtggtgccgacgtccggcagcttcgagcgggatgagcaggcgctctgcatgatgggctccaggcaaacagggaagtgttgagcgattaagcatcagccggcgtaggcggacaagggaaagtttgtcatacttgccatgcactgtgatcatagctaatcgaggctcgctatgccgatatccttgccgtcgctcgacgtgttgaaaaccttcgtggtggtggcgcaacgccttaactttacccatgccgcccggcagctgcacctgacgcagggggcggtcagtcggcaaatcctcgggctggaacagcgtctgggctatccgctgttcagccgccaggcgcgcggtctggcgctgacgccgcagggcgcgcagctgctggcgccggtacagcaggcgctggggcagttggatgaagccctgacgcgggccgccgctccgccgggggcgctgcgcatcaaatgcccgacctgcgccatgcgctgggtgctgccgcgcatcattcgcctgcaaaatgaacggccggacatgcatatcgagctgaccgcctcggtgtcgcacggcctggatttcagtaccgagcagtttgacgccgcggtggtattcggccggccgccgggtaaaaagctgaccgcgcacttgctgttcgatgaaattctcacgccggtctgcacgccgacgtttctgccgccggcggcccggttgacggacttgacggacaaaactctgctgcacccgacgcgcgatcggcgcgactggctgcgctggctgaaggcggcgggcgccgatgcgttgccgtccggcaaggcccagcatttcgataccctcgatctggcgatgagcgccgcgctgcagggattcggcatcgccatcggcgatctgtgcctgctggaggaggatattcaggcgcagcgcatcgtcacgccgttcccgctctgcgtcagcagcggcgcggcctattatttggtctatcctgaacgcacggtggcgccgccgacgttaaccgcgctggtcgattttctggcggcggaggccgccgacagccgcgcccggctgcagaattacctgccgataacctgtaatgctttgtaaacattagcgatgcgaattcccttggcgatgaaacagagtatggcaaactgtttcttcactccgattaaactccgcggcgttggcggcggaaacacgcctgagataaaacaagatgaaatggctttgtgtggtgagtatgttgtccggtctggccctcagcccggcttttgcgcaggaaacgccgataacgcagggcattcacgcccagcagcgcgatgccttcgtgtcccatttgatgaagcagatgacgctggaagagaagatcggccagctgcggctgatcagcgtcgggccggataacccgaaagaagcgatccgcgaggggatccgcaaagggcagatcggcgccatcttcaataccgtcactcggccggatatccgggtgatgcaggatcaggcgatgcagctcagccgcctgaaaatcccgttgttctttgcctatgacgtggtgcacggccagcgcaccgtgttcccgatcagcctggggctggcggccagcttcgatctggaagccatcgcgctcagcgcccgcgtggcggcgcaggaggccagcgacgacggcctgaacatgaccttcgcgccgatggtcgatatcacccgcgatccgcgctggggccgggtctccgaaggcttcggcgaagacacctggctggtctcgaaaatcgccaaggtgatggttgacggtttccagaacggcgatccggccaaacccggttcggtgatggccagcgtcaagcactttgcattgtacggcgccgtcgaaggcggccgcgattacaacaccgtcgacatgagtccgctgcgcatgcatcaggactatctgccgccttataaagcggcggtggacgccggcagcggcggggtgatggtgtcgctcaacgcgatcaacggcgtgccggccaccgccaacccgtggctgctgaaagatctgctgcgcgagcagtggggctttaaaggcatcaccatcagcgaccacggcgcgatcaaagagctgattaaacacggcgtggccgccgacgcgcgcgacgcggtgcgcctggcgatcacctccggcgtcgacatgagcatgagcgacgagttttacgacaaatacctgccgggtctggtgaaagacgggctggtgtctgaaagcgatatcgaccgcgcctgccgcgacgtgctgaacaccaagtacgacatggggctgttcaccaatccttacgtgcatctggggccggcgggttccgatccgcaggacaccaacgccgaaagccgtctgcaccgcgccgaagcgcgggtggtggcgcgcaagacgatggtgctgctgaagaacgataaacagacgctgccgctgagcaagcaggcgaccattgcgctggtcgggccgatggccgacagccagcgcgacgtgatgggcagttggtcagccgccggggtggtcaagcagtcggtcaccctgcgcgaagggctggagcgggcggtgggcgacaaggcgcgcattctgtacgccaagggcgccaacgtcacgcaggataaaggcatcatcgactatctcaacgagtatgagccggcggtggcgttcgacacccgctcgccgcagcagatgatcgacgaagcggtgcaggcggcgaacaaggccgacgtggtggtggcggtggtgggggaatcgcagggcatggcgcatgaggcctccagccgcgccgacatcacgatcccgcagagccagcgtgatttgatcgccgcgctgaaagccaccggcaagccgctggtgctggtgctgatgaacggccggccgctggcgctgagctgggagagcgagcaggcggacgcgatgctggaaacctggtacagcggcaccgagggcggcaacgcggtggcggacgtgctgttcggcgactataacccgtcgggcaaactgccgatgaccttcccgcgctcggtcggccagatcccgatgtactacaaccacctgaacaccggccgtccgttcggcaaggagaatccgggcaagtacacctcacgctacttcgattcgccgaacggcccgctgtatccgttcggttacggcctgagctacaccaccttcagcctgtcggatctgaaattgtccagcccgacgatggcgcgcaacggcaagctaaccgccagcgttacgctgaagaataccggcaagtacgacggcgccacggtggtgcagctgtatctgcaggacgtcaccgcctcggtcagccggccggtgaaagagctgcgcaacttcaagaaagtgacgctgaaggccggccagtcgcagcaggttgagctgccgattagcgaagaggatctgaagttctacaacgccagcctgaaatggggggcggagccgggcaaattcaacgtgttcgtcggcctggattccgacaacgtgcaggcgcaaagttttaccctgaagtaaccttttccccctctttcactgcggtgggagaggggcactatccctttccgctcatgtcaccggagcttgcctcatgaaacggtatctggactgcagcgccagcgatctggccgatatcggcaaagccgatctgctctatgccatccgcgccagtgaagggcgcattctggtcagcgaaaccattgcggtcactcagccgctgctcaataatgtcaccaacgccgagctggcggccagccagggcgccgatctgctgctgttgaacctgttcgacgtcgatcgtccgcacatcgcgggcctgcccgccgacgtgccgccgcaggaggcgctacgcacgctgcagcggctgaccgggcgagtgatcggggtgaatttggaggccgtcgatccggccttcgccatcgaacataacgacttctggcagatgacggcgggccgcgccgccaccgccgagaatgcgcgcaagctgtatcagctcggcgcgcgcatgctggtgctgaccggcaacccgaacaacggcgtcagcaatcaggcgatcgccgccgcgctgaaagcaatccgcgaggaagtgggcgacgagatggtgctggtgaccggcaaaatgcacggcgccggcatcgtgcgcgaaagcggcagccaactgatcggcgagcaggacatcgcgctgttcgtggagaacggcgcggacatcgtgctgttgccggcgccgggcaccattcccggcatgtcgcaggagaaagtggcggcgctgatcgcctttgcccagcggcagggggcgctggcgatgacggcgatcggcacctcgcaagagggggccgacgtgcagaccgtgcggcagattgcgctgatgagcaaaatggccggggcggacctgcaccatatcggcgataccggctatctggggctggcgctgccggaaaacatcttcgcctacagcgtggcgatccgcggcgtgcgccacacctacagccgcatggcgcgctcggtgaaccgctaagcctggggtttttgcgccgtgacgatgctgaaatagccgagcgacggcagcacctgagcgggcccgaagccgacgtcgcgcagcaggtcgccgatttccttgccggagtattggcggccctgcgtccatcccatcatcatcaggctgtaccccgcggcggcaggcggcccgtcgccgtcatcgttgtacagcacttcgtggatcacgatcctgcccccgggcgggagggccgcatagctcttttgcgccaggaagcggttcttgttcatcggccagtcgtggaaaatattggagtacaggtgcagatccgccgccgggtagggatcgcgccacatatcgccgctgtgggtgccgatgcgctgactgaggccgtgatcgtgcgcgtagtcggcggcgagcgggcacacctccggcagatcgaacacggtgcacgtgagcgccggccagtgggtcgccagactgatggcatgggcgccggaggcgccgccgatatccagtgccgtgcggcaggcaccgaggggcaacagcgtaggccaaacgctggccgagcccatgctcaggctgtgcatggcgtgggtaaacagccgcattctgtcggcgtcgagcgtatgggtttcaaacagctcctgctcgccgtacacctgcgaggcattctttctgatggcgctttccaggtttttcagcgtgaaaatctcgctgttttcaatcatcaaatcccaaaaatagccgaaataatgcgggttgttttttatcaaaaaggtttccgcttccggcgtcagagagaatgtttcgccgtctctgtctatcaatttcaatgccactagcgccatgaccagcgtctctgccgggcgtctttccacattggcctgagcgcatatatcggtcaggttgcgggggcgcaatgcaataaattcaaagatgcccaggcggtgcgcaataagcgccgccggatagagatataaattcatcgtgatatcgagaatggttttgtcgtcgcatggcggcggccggacggaatggttcatgtgaatcccctcccactaaggcatggcgcgtcttaacaggctatgttacgcctgtggttttagcaaagggcgggggcgcgattgaccgcaggccaacgcttacgttgtaaataattccctggtgatactattttaaaattgaatggggtacggttaatgtcgaacgtaaaaactgacgtcgggcggagtaataaccccatcatgcatttttattttactggaggttaacttaatcacagttattaacgcgttagggttgtgttaatctgagccgccgttataccgtaccgacgttcacattattttttgtgaataattcaaagctaaataattcattattaaaacgagataacaatgaaaaagagcattctgaccggcatgattgccgcgactctgggcctgttcaataccgctaatgccgaagggatggaccctgctgcattgaaaaacgtctatgacattacgcgtaataccagcgggctgatgtcttactgcgtcgataaaggttttctgaaagcggacagtatcgacaacgccaagaaaatggtggcctacgtggccgccattcccggcggtgtcgacacccgcgacggtgacaagcgtgaagcgatgggccgtgaaggcaatgtgctgaacgacgacggcaaagtggttgcgttggaaaaggaagcgccacagggtctgcagacatggtgccagcaggctgacgaagggatccgccagggtctgacgtctatcggccaataaacgccggatgtagcctccccctccctaaggcttcgtctgaagggaatctccgggcctgacggcccggagaatctcaccaaaacagcggggtggtgttttcagccaaaaacgccagcagcgtttcgttgaccgccgtcgggttttctttgttgctgatatggccggcgttggggatcagcacatgccgacagccgagaagatccgccatgcgctggccttccgtcggcgggcgcggtttatcctgcgcgccggtgatgacgatgctggcggcggtgatgttttccagcagcgccagcttgtcggggcggccgaagatcatccggcccagcggcacgatgctgtcgcgcagccgatcggcgggcaggctttgcagatgggccagcaaaggctgcgacagcgcagcgggcacttcgtcggaatagaactgcgccgcgatatattccagcagcggtgacgtgatggcgccggcctgttccacggcggccagcatgcccatatagcgctgccgcgcctccggtgtttcgtcgcccaggtagctgtccagcagcgccagcactttcacccgttccggcgccagcgccgccagttccgcgccccacatgccgccgacggacaggccgacgatgccgaactctgcaatatccaaatgatccatcagcgccagatgatcggcggcgatatccgacaggctgtttcgcccaggcggcagcgccggggagtcgccgtggccccagagatcgggcacgatcaggcggtagcgtttcgccaacgcctcgaactgcggtgcccacatgttcagatcgaacagatagctgtggcccagcaacaacggaaagcctgagcccacgtcgagataatgcagggatttgcccatcgttggcatcttgtcggttccttatataaagagagttcggctgcttatatcacactcatattcaacccacggtattaatttactttaaattactcaggtggacgcgggttttttaatttgcattgctaacaagacgtcaataaaaggtgacgctaaggctaatattttggtggtgagcggagccttggtttatgctgtcgctcctttcggtatggaatagataaacagggcgtcgcgatgaaaagacttttcagactattaattattttgcttgtcattttgctgctgacggcggtgctgtggtggttcttcgggcgcggcaatccgaatgcgctgtggcaaatcgtcagccaacagtgcgtgcccaatcagcagcagaacaacgatccggcgccctgtttaaaggttgatttaaccgagggttatgtgctgtttaaggacagcaaaggcccctatcacgatctggtgatgccgaccgaaaaggtcagcggtatcgagagcccggcattgcagacagagcacgcgccgccttatttcgcccaggcctggaataaccgtgaacatatatccggcgagctgggtaaaccgttaaaagatgcgtggatttctctggcggtcaattcgaaatatggtcgctctcagaatcagctgcatattcacgttgcctgcttgcgccaggatgtctataacgcgctggggcagcaggcggaacaattagatcaacagtggcggccgctggcggtgaaattgctcggtcaccaatatctggccagaaaattggcgggcaccgatttaacccaggaagatcctttccgtttactgcagaactatgtggtcgagcagggcgacagcattggcaattacggcctggcgctggcggtcagcccgcagggcgagatgctgctgttggcgaaccgtttgaagctgaccgatctgaacctgggctcggccggcgaaattcaggactaccggtgcgaggtcgcggggaactcaagatgataacggcccgccggcgtggtcagccggcggctgccgtgcggtcagagttttttcagcaatgccatcagctgcgtttcgcttttctccgccagcccgtcgatggcgagcttgatgatgtcggagcgggtgatgcgcacgatgccgttgcgcgccgcctgcacgatcacctcatcgatggcttcgatgtggttgtccgtcaggctgacggaaatcgccttataggtgcgcttgcggccggccggcttggcttccggcgcgggcgccgcaaccggcaacgtgtgtgaggtggcgctgttgatgaattcgtcttccgacatgcggtgggtgggggtgcgcttcttcacaggatcacctctttcaccaggcattcgatctcggcctgcgccttttcgttgttcgcctcatgcacggtgatggcttcgccccaggcgtcgcggtaaattttgcgatcgcacaggcggtggctcaccagggtgaactccgggtattcgctcagcacctgcgccgcttcgttggcttcattaatgaagatattggtcgggcacatgttcagcacaatgtaacctttgaccttctcgttgtattcctgcgcggtggagaacatctccgacaggtagccgatggtgtcgagatccatctgcgaagggcgcagcggcgagaggaacagatcggcggccaacaggccggagcgcagttcggcgctgtcgcggccggcggtgtcgacgatcacgtagtcgtaatggcgatcgagctccagcagcgtttccttgattttgcccgacgcggccaccaccggaatgtgcggcaacccctcgacgttctgacggtcgttgtaccaggtcatgatcgatttctggtcgtcggcatcgacgatgatcgccgtcttgccttgcttaagaatcagatacccggcgatattcaccgctttcgtcgacttgccgacaccgcctttttgcgagccaatcagaacaatcatgctgccatctctcaagttattaagcaggtaacttattaagttaatgtgcttattaggttgataatcaaacaggttaacaagaacaactcgcgaacaatatgcaccaactgcggcggcttgccaagccagtatgtcgttaactgtgcagcttattttgcgctggatggcccggatgggtaagtaggaattctctgggaagtggcgatgcggagggggattttattaatttaacagcttaataagttagtgactcattaagctgttgtcgacattatttcttcatcatcgccttcaggttggcgaacgggttgtgggtggcgacgccgatatctttttgcgcatcttcaccggccaccaccgtcgaaccgtattgatcggcctcggtgtatttcgagtgttcgtggtcgtggcaatacaggcacagcatttcccagttgctgccgtcttccgggttgttgctgtgatcgtgatcgatatggtgcaccgtcagctcgcgcaggttggaataaacgaattcgcgtgagcagcgcccacacacccaggggaacagtttcagcgctttttcgcggtagccggtttccagcttcgcatagtttttggggatataggccatggtggtcgtccgtcgggaatcaatatgcggccaataataccacagtgcgtgcggctacaacgtgcggctcatcaccgtgacggtttcaccggcgacctggcgttgctccagagggcgccagccgagtttctgatacagcgtctgctggtcgggcgtatacagatacagttcgctgatgccctgggttcggccgtgctcgatgcagcgcgcgatcaggttgcgggcgatgccttggccgcggtgctgcgggtgggtaaagacttcgctcagccagtattggcgctccggtttatctgtcaattcataccgcgtcaaactggcggtgccgacgatctgttgctgcggcgacagcgccagcaacacgacgccttggctctcgggcgcacagcgttcagccagccgccggctgatggcgtcgcggttgctccactgcgcaaaggcgccccattcctgatgcagtaattcggccagttcgtcaatgcgctgacgatgtgcaagcagcggttcgatatgcatggtttgcccgtttttattgtccgtaagagaagccactatagccggggcgatcggttaatgaaacgtctccaccgcccagtcgatgaacgcccgcagcttgccgctgaggtggcgattggacgggtagaccacgtacatctgctccggcggcggctgccagtcgtgcagcaggctgaccagctcgccgcgctcgaggtgcggctgcgccataaaccgataaatctggatgatgcctaatccggccaggctcgccgccagcagcgcgttgccttcattgatgctgaccgggtagcgctgttggatggcgatctctttgccgcgctcgacatagcgttgcggatggatgcggtcgttgaccggatggcggtagtgcaccatcggaaagccctgttccagatcgcacgggtggcgcggggtgccgtggcgcgccagataggccggggtggcgcagctgacccagtccagatcgaacagacgccgggcgatcaggctggagtcggccaatgggccgctgcggatcacgcagtcggcgctgtcgctgatcagatcgataacgcgatcgccgatgctgagatcgatttggatttgcgggtagcgttccaaaaagccgggcagcgccggcaacagcagttggcgagcggtgccgctgccggtgtcgatgcgcagcacgccctgcggagaactttgcgactcggtcaggcagccctccatctgctccaaatccgccagccatttcaccgtattttggtaatagcattcgccttcgcgggtgaccgacacgctgcgagtggtgcgctgaaacagcttggtctgcaggtgatcctccagattttggatcagcttggtgaccgtcgctttcggcatgcccagcgaatcggcggcgcgggtaaagccgccggtttccaccacgcggttaaatacccggatagcgagcaaatgatggtccatagggttctcaacgccatgccccggcggtgaccggggcatgtttctgcagatagataatgattaacactgtttagcgccaatcgcgccggagcgcaagctgaggccgaacaccagcgtggcggagaggatcagcgcgccgccgaacagcatggcgctgctgacgccctgccagtccaccacctcgccgcccagcaatgcgccggaggccagcgcgatctggacgacgcacaccagcagcgcctggccggcctccggcgcctgcggcaccgcggcgaacatccagttggtggcgcacaccggcacggcgccaaaggccagcccccacaccaacaccatcagcgtggcgccgccgaggccgctgagcagcggtgagacgatcaggatgcctgccaacatggcggcgatcaggataaaggtggcgcgcaggctgtattcccccaggcgttcgccgaggaacgtgcccagcaggccgacggcaccataggccaacagctgcagcgagatggccgacgggctgagcacgaacacctgctgcagcagggggcgcaggtaggtataggcggcgaagtggccgatgaacagcagcacgatggcgataaggccgatgcgcgccatcggcaggcgcagcggcagcaccagatcgcgcggcgtgaccggccgggacggcggcaccgacgtcagtaagcgcagctgcgccaacagtacgccgaccgccagcgccgcgccgccgaagaaggcggcgcgccagccgaacagatcgccgaccagtgcgccaatcggcacgccgcacaccgcgccgaccgaaacgccgctgaggatcagcgcggtggctcgcccctggctggcttccggcaccagatggcggccatagttggcggcgaacgaccagaagccgccgacgcagacgcccagcagcacgcggccgagcaacatcatcggaaagttgacggccagcgccgccaccagattggataccaccagcagcaacgatagccccagcatcaataaacgccgatccaggcggccggacatcaggctcaatgcgggggcggccaccgccgccacgatgccgggcatggtgaccatcagcccggcgctgccggtactgacgccgagcgagggggcgatgttggtcagcagaccgatcggcagaaactcggtggtgaccatgacaaaacaggcaaccgtcagcgagaagatcgccaaccacggggatgatgcagggttatctttatgattcagcataatgccgctcttctcaggtgaatgcgcaggccgcgcgcggggcgcagcgtgaccgaaatcacaatttacggcaggcgagagcggcggataaatccatctgcggtggttacactgtttctgagggggaacaatcgcggcagtgagttaaagcgcggcttgcgccgcgccgaggggaaaggaataaaacggcataaggttatgaccgaatgccgcgaggcgcttacagccccggcgctttccacagcgaggtggtcaggccgttgtccaccagcgtcaactgatcggcgtagatccgccgccaggtttctttctgttcctgatacagcgcgtggtgggtcatgtccggctgatgctcgcgctcccagcgcaccaggcgctcgccggtttcggccagcgatgcgtacagcccggcgccgacgccggcggcgatcgcgcagcccagcgcggtggcctctttcaccaccggcacccgcaccgtcagccctgtgacgtcgctgaggatctggctccacagcttgcccttggccccgccgccggcgaacaccagcgaacgggcctgcacgccggagaaggcggcgatctgttccagattgcaggcggagacgatggcggcattctcctccagcgcgcgaaacagcgtctgtttgttgcagcgctccgggtcgatcgacatgttgatgaacgacggcgctgcgtgataccaggttttgaaatgcatggcgtcggagaaaatcggcatcacgccgtaggcgcccggcggcactctggccgccatctcttccagcaggctgtaggcgtcgacccccagccgctccgccagcagtttttcttccgcgcagaaggcgtcgcggaaccagcgcatggtcaggccggtaaagaagctgatggattctgcctgcgccatgccgggaatgacgtgggggttgatgcggatgttcatctccggatcgatggccggctccggcaggttgacgatttgctgccagaaggtgccgccgagcaccgccgtctgcccggcgcgcacgatgccgagccccaggctgccgagctgcacgtcgccgccgcccatcaccaccggggtgccgcgcagcagcccgctctcctgcgccgcctgttcggtgacgcgccccagcacgctgccggtctctttcaccggcgacagaatatcggcgcgcaggccggccatgtcgagcaacgccggccgccagtcgcggctggtcagatccagcatgccggtagtgccggcgttggaaggatcgaccgccagttcgccgctcagcatgttggccagccagtcgctgatcatggtcagcgtcgccgcctggcggtagatgtccggccgatggtgcgccagccacagcaggcgcggcatggcgctcagcgccagcgtctggccggagtgctggtacacctcgcgttcgaagccgtggttgtgcagctctttcagctcgctgacttcgtggctggcgcgtgcgtcgacgttggcgcaggcccagatcggcacgccgttgcggtcgtacagcacgatgccttcacgcatcgagcagcaggccaccgcgcggatcgcctgagcgctcaatcctgcacgttgcatcgcctggcggatgcactggcaggccagctgccagttgcggctgaggtcaaactccatcgagccgggcacgcccggcaccgcgaggtgttgccactccgcctggccgtgcgcgatctggttacccgccagatcgaagatcaccgcgcgaatgctgcccgttcctgcgtccagcgccatcaagtagttatccatagcctatgctctcagggggaggaatgttaactatagatgccgccgccttaccccgccgggggaggagtgggcgtcgccgacgcgatttgtgagccaggcggcaaaattgccgttgcagcagggcaatcgacgggaataaacctatggttggaaagcgccatgttacggcgcgccgtttaaacaaggagttgccatgcacgtcacattggttgagatcaacgttaaacaagacaaaatcgacgaatttatcgatgttttccgcgccaatcacctgggcgcgatcgaagagccgggcaacctgcgcttcgatgtgctgcaggatgaacagatcccgacgcggttttacatctacgaagcctatcgcgacgagcaggcggtggcggcgcacaagcagaccccgcactacctgcagtgcgtggagaagctggaagcgctgatgaccggcccgcgcaagaagaccacctttatcggcctgatgcctgaataatcgccggcgtttgccggtgtccatgcgcccggtttggttgtaacctgcaaggcaaagcgaattttcaatgggataagcggggcgaggatgacattgcgcgatcggctgttggcgctgttggtggtggtgatctggggcgtgaatttcgtcgtgatcaagttcggtttacagggtatgccgccgtttctgctggccgggatgcgttttttactggtggcgttgccggcgatcttctttatcccgcgcccgactattccgtggaaatggctgctgctgtacggcatgaccatgagcttcgcgcagttcgcgtttctgttcgtcgccatcaaggtgggcatgccggcggggctggcctcgctggtgttgcaggcgcaggtgttcttcaccctgctgttgggcgttgtgctgatgggcgaaaagctgcggatcaaccatttcgtcggcatcgctatcgccagcggcggcatgctggtgctggcgcaggccagcctgcataagccgggcagcggcgcggtccctctggcgggcctgctgttgacgctggcggcggcgttttcctgggcgctgggcaacctgaccaacaagaagatcctggccggtttcccgcagcgtaatatcttatcgctggtggtgtggagcgcgccgatcccggtcgtgccgttcctggcctgcagctggctgttcgacggccctgaggtggtgctgagcagcctgagccatgtgcaggttggcacctggctggcggtggcctatctggcgttcgccgccacgctgttcggttattcggtgtggggcagcctgctggggcgctatgaaacctggcgcgttgcgccgctgacgctgctggtgccgctggtcgggctgttcgccgcctggctgttgctggacgaagcgttgtcgccggcgcagttcggcggcgcattgctggtgctggcaggcatggcggtcaataccttcgggctgccgcgccgccgggccgtcgccgtgcgctaaaccgaatagggtaattctgttcaatacgctgtcggcggcggtcggcattctggcgcctgtgaatattttctcaggtgtccatcatgaatatctacctttccatggccgcgtttgcgctggcggcctccatcactcccggcccggtcaacatcgtcgcattgagcgccggggcgcaattcggctttggcgcaacccagcgccatgtgttcggcgccacgctggggtttaccctgttgctggtgctgctgggattgggcatgcaccaactgctgatcctgtggccggggctgacccgcttgatccagtgggccggcgtggcctttctgctgtttatggcctatcggctggcgtttgacgacggcagactgggcaacggcgcggcgcaggcgccttcctgttggtacggcgcgctgatgcaatggctgaatcccaaggcatggctggcgtcggtggccagcctcggcgcctttgtcggcgacggtgacattcggctgctgtggcagttcgccgggctctacttcgtgatttgctatgcctcggtagcctgctgggcctatgtcggcgcgatgctgcgcggcctgctcaggcaggcgcgcaacgtacagcgctttaatcgcgcgatggcggcgttgctggcggccagcgcttgctatctgttggcggagggtttttgatactggccgggcgtggcggccaacagctgtttgaaggtgcgctgaaagtgcgcctgatcggcaaagccgctttcgctggcggccgcggcgatcggcaggccgcttttcaatagccgatggccgtgctgtacgcggcggttgaccagataggcgtgcggcgtcatgccgtaacgctggcggaaggcgcggatcaggtaagaaggggacagcgcggcggcgcggcaaatgtcgtccagcgtcagcggccgggtgcagtgcgcgtcgataaacgccgccgccgcttccagccgggtatgcggcggcgtctccggctggcggacatcgcccagcccgagctgcagggcgctgaaatactccaccatggcgatctgtttttccagcgcgctgcacagcggatccgtcagcagcgcataaagccggttcagcccgtggaacagcgccggatcgcggctgagcggctggctgaacggaacaaaacggtcgccctcgccgccgagcagctcctgctgcagcgcgccgagccaggcgagatcgagatagaacatgacgtacgaccaacggcgatcggcgatggggttgcaggcgtgcgcctgctgcgggttgatgacaaccagatcgccggcgctgacctgcatgcgtcgttcgccgttgacataggtgctgacgccgccggtgatggcgccgatggaaaagaattcgtggctgtgcaggctgtagcacacctggcggccatccgcgatggcgcgggcttcgacgaacggcaactgcggatcgcgccagaactgcggcgttttttcactcatacgctttccttttcactgcggcggcatcacagtgttatagcctgaaagcgacgagtgggggaatggcggatgatgatttttaacgtgttcggccgtctgctgggcgtgaagcgcatcggggacgaatggcggctgttccgcgtgacgctgccggagcgcaaatatgctcccagctacgatatcgtgctgccggcggatctgcgcgaagaggagatcgccggctatctgggggatatttatcacgaggccgccacgccgcagcggccggaggtgtttcgcgtcgagtagcgcggccgttactcttccgtattgcgcgccatgaggcggcgctgatgttcctcgctggcggcctggatctcttccagcaccgagccgacgtcggcgcgcttctggatttcgttgaaccggccgctgagggcgctgtccggcgtcaggttgccttcctgatacagcgcccaaatctctttggcgtattggctgtcgcgcagttccggcgcgaactggccgtaatattcggccagattgccgatatcgcgctcgaacatgcttttggcgtggttgttggcggcggcgtccaccacctgcggcagatcgatgatcaccggtccgtctttatccatcagcacgttgaattccgacaggtcgccgtgcaccagcccggcgcacagcatgcgcaccgcgtagttcatcatcagggcgtgatcggcgcgcgcctgttccggcgtcaggatgacatcgctcaggcgcggcgccaccaggccttcttcgtcggtgatcagctccatcagcagcacgccgtccaggcagatatccggctgcggcacccgcaccccggccttggccagcagatacagcgcgtccacttcggtgttttgccaggcttcttcctgctgctggcggccgaatttggagcctttgctcatggcgcgtgcgtcgcggctgttgcgcaccttgcgcccttcctgatagtggacggcctgcttgaagttgcgcttctcggcctctttgtacactttggcgcagcggatctcatcgccgcagcgcacgataaacacgtcggcttctttgccgcttttcaaccggcggatgacgtcgtcgattaacccgtcatccaccagcggctggagtcgttttggaattttcatgcagccttgtaccctatttaggctccggtgtgaatggcttgcgcagttgatagcgtaagttagacccgaaaggcaaacattagttttgccgccgcgacatcattacgcggcggcgggcgatcagaggctgtcggccggcacccagacgctgacgctgccggcgttaaccgggaaatgggcgctgccctggtcgtcggcggtgatttcctccgggcggttgccgaggaaatcgcgccaggcggtgtgcgccagatcggcgccgagcgtaaccgtcttgccgctctcgccgccgttggtcagcaccaccacgcagccgggagcctcggcagtgccggcgcggctgaaggccacgcagtggctgtcgtcgaagtagtcggtttgcgggccgttggcgaagcgctggcgcgcggcgatcagcttctccagctccgggatcgccggcatgtcgatctgatattcaccgccgtcgcgccccttgtcgcggtagctggcgccatacaggtcggggtaaaacacgcagggcacgccctgttcgcgcagcaggatcagcgcgtaggccagcggtttgaaccaaggttccaccggtgcttccagcgattgcagcggctgggtatcgtggttggcgaccagcgtcaccgcgtgggccggatcggcggcggtcagggtatcggtgaagatctgcgccatgtcgaagccgtcgccttgcttcgacgcctgatgaaacttcaggtgcagcgccacgtcgaacagcatcaccttgccgtccaccaactcgatgtattgttgcagcgcgctgagatcgtgcgaccagtattcggcaacgataaacaggtcgcgttgcgcgctgccgcgcacgtgatccgcccactctttgaagaaccaggcgggaatgtgtttggcagcgtcgaggcggaagccgtcgcacggcaaggtttccaacagccagcgcgcccagtatttgagctcctccgtcacggcggtattgcggaactccacgtcggcgcccatcagatagtcgtagttgcctttctcgtcgtcgacctgatcgttccagccgtcgtcgccataatcgttggcgattttgaacactcctttgtcgtccggctgctcaacatagtcgacgccgctgaagcatttgtaatcccagataaattcggaatgcacgccctggcggccggggaaggtgaagcgggtgtaggccagcgcgtcgaagccctgatcgtcaatgtcgttgcggttgttggcgtccaccttgaacacgtgcacccgttctttctcgtccgcgccgagcttgtggttgaacaccacatcgtaaagcacgcccacgccgtgttcacgcagcgtattggcggcatgttccagcgccgccttgtcgccgtatttggtcgccacgctgcctttctggtcaaactcgcccagatcgaacagatcgtaagtatcgtagccgacggagtagccgccggaagcgcccttacaggcgggcggcagccacagatcggtgatgcccagttcggccaggtgcggggcgcgctcggcggcctcctgccacagtttgccgccgtcggggtagtaccagtggaagaattgcagcagggtggtttttttcgtcatgagccagcgtcccggttagccagaaggagagaagcagttaaagcatgggctacttttggcaaaagggacaatggcgcagggaagcgcgcgaaggcaggcgtaaatatgtaaccgacgttgacgaggtagcgcttgagttgttgctatcaagtttttacgttttaaattttatcttttaaatttcaaatggatatttattttattttttgttttacccacttttgccgtttttatgctcacttttattggatttttatttcaattttaaatcttagtatgatttttaattttattaatttgttttaaattggatttaaatgctgtcatatgaaatattttgacatattcaggtgccggattggttattcattcgcaattgtttatgcgttatcgttatgttcaaaattagataacactatcaaccaataacccatccaacgtagcctgaaggtgggagaacaggggagcataacgccgtgaacatcagggatttcagagcattggcgcgcaatttggtcagagaattcggcatgttgaacaagcagagcaacggctcgcgcttttcgccgctgcagatccatctgatgatcgaagtcagcgagcagccgctgggcgtcaccgagctggcggcccggctttgcatcgacaaggccagcgccagccgggcgctgcgcagcctggtggccgccggcgtgatagaaacggtggatcatcctgatgacaagcggcacaacctgcatcggctgagtaaacagggcggcaagacgctggccggcatcgagagcgacgccgacggttttatgcaggcggcgctggcgcagttggacgacgatgagctggcgagcaccactgcggcgatgaaaaagatgaccgcggcgctgcgcagcgcgcgcaaacagcgcgacgccaatctgcgggtgcggccgatcgccgagcgcgacgatgcggcgatggcggcgatcattcgcgacgtgtttcgcgagtacggcatggacaaaatggaaggggtcagtctgcacgatccggatctcgatcggctgaccggtctgtatcgcgacaacggcggccactactgggtgctggagcgggacggacaggtggtggggggcgtcggcatggcgccgctggccggcgaagagcccggctattgcgagctgcaaaaactgtttttcaaacccggcgcgcgcgggctgggcatggcgcgccatatggtggtgcaggcgctgaaggcggcgcgggcggcggggtatcgctactgctacctggaaaccaccgaacagttgaaagaggcaatcgggttgtactatgcgctggggttcacgctgttgacggaacggcgcggcaataccggccaccacggctgcaacgtatgcatgctgaaaaatctccagagcgacgatatgtgagcggtttcaaggttagcgcccgcgccttgtgtcaccctgttaaccgtttgataacaatcacaacgttttatcagggaggaaactatgttgggggatccgatggcgctgcccgcgctggtcacgctggtggtcatcgcgctatgggccagcgcccgcttgccggagtatgtggtcgcgctgctgttctttgcggcggtgatggtcttgcagctggcgcccgccgcggtgaccttttccggtttcgcgtcttccgcattctggctggtgctcagcggttttgtgctgggctccgccatccgcagcaccggtttggcggatcgcctggccaaccgactcttgccgcatctggccggttcctggccccggctggtgggcggcgtggtggcgataagctacgcgctggcgtttgtcatgccatccaatatggggcggattacgctgctgatgccgatcgttatggcgttggccaatcgcgccggtctggcggaaggctcgcgcggccgcatcggtttggcgctggcggtggggttcggcaccttccagctctccgccagcatcctgccggccaacgtgcccaatctggtgatgagcggcgcggcggaaagcgcctatggcagccacttcgcttatctttcttacctgctgttgcacgccccggtgctcgggatcgccaaaggcgcgctgctgacgctgtgcatctgcggcctgttccgtgcgcggccgcagccggtggcggccgaggcggcgcaaaccccgctcagcgccgccgaatggcggctgatcgcgctgttgggcgccacggtgctgttgtggatgaccgacagctggcacggcatcgctcccgcctgggtggggttggcggcagcgtgtttctgcctgttgccgcgtatcgggtttctcaacggcgagcagttcgccgccggggttaacgtgcgcacctgtatctacgtggcggggatcctggggctgaccgcattggtcagccactcggggctcggcgatcggttgggcggtgcgctgctggcgatgatgccggatctgcatggcaaaccgttcgctgcgttcggttcgctggtggggatcacctcgttgctgaatttcgtggtgaccgccaacggcgtgccggcgctgtttactccgctggcgcaggcgttgtccgcaggcagcggcttgccgctgctgacggtgctgatgacccaggtaatcggttacgccacgccgctgctgccgtatcaggcttcgccgatcgtggtggcgatggggatgggcaaagtgccggcgcgcgaggggctgaagctgtgcctgctgttggccgcgctcagctttgcgctgctggtgccgttggattatctgtggttcagactgctggggtggatcccgtaaacagccctgcgccgccggcaaaacaatcttcgtccagcgtcagagtggcgattttatgcaccggtccgcgcatgctgacctgaaaatcgccgctgaaggcgatctgcagctcgccgcccggcatccgcacgctaacccgatcgccgactcgtcccaacttgcgcatcacgctggcggcggcgcagctgctgctgccggaggcgagggtaaaaccggcgccgcgctcccagatgccgatgcgcagcgtctggcgatcgaccacttccaccagttgtacattggtgcgtttcgggaacagcggatggcgttcaatctgcggtccgagccgatgcacctgcgccagatccagtttttccaccggcaccacgcagtgcgggttgcccatcgacaccagcgaaacgcttaacgtctcctccctcaggggcagcggatagttcagcgcctccggcagatcgatcaacgccggcagcgccgccgggctgaaattggcgcgccccatttccaccgttatctgatgcgcgtcttgcgccacctggcagcgcacgtcgccgccggcggtgtgcaccaaaaacggttgatggcccacgcggccgctgtcaaacagatagcgcgcgtagatacgcaggccgttgccgctcttctccgcttcggaaccgtccgggttgatgatgcgcaaggtgggattgacggcgtcgccgctgtcgatcagcaggccgtcggaaccgatgccgtaatgcgggtggcacagcaggcggatctgttcatggctcagccgatcggcgaccgaacggtggcataccaggtagtcgttgcccagaccgtgatatttgtggaacagcaggggagtcatggcgttgctcggctcagcggaaaaaggtcgctacagcttacaacagaacgttggcgttaaagcaagcaaaaggcggcctgagccgcccttttgcacgattgccgatccggccattaattgtagatgatcgcggtgccgtgcagtttattgtcaccggtggtggcgatgatctggaaggattttgcgcccgccgcatcggctttggccgccagtttgttttctaggctgctcaggtcggacgcgccgctgacggtgacgacgccggctttttgcaggtcggcgggttgtgcgttaaccagttcggcggcgaagctgccgaaggagacggaagccagtgcgatggcggcgatggtcattttcaggtttttcatggtcttatttcctatctttgttctttacgatgtttgttttgtaaggtcgttaaattaattaacgatcgataatttaatgttagatgccggtttgacggattgcaagtatttttttaatgatcgttaattaattttttttgacgccctggcgtcgggagcacaacttatcgcgatccgttggtttaattcattgttattgatagatttctgcggtcccgtgcagctggttgttaccgccggcgccgatgatacggaaggattttgcaccggcctgatcggctttggcggccaggctgctttccagcgaggtcagatcggatgcgccgctgacggtaatgacgcccactttctgctggtcagccggttggttctggaccaaatcagcggcgaagctgccgaaggaaatgctggccagagtgagggctgctaaggttaattttaagtttttcataatgttaattcctttccgataacggtgaatagaggggtttaatccgcttcgctaaattatcttaacgatcgataactaaatgctaatcggttctcgacgagggcgcaatatttttttataatgatcgttaagttatttgtgctaaccctgctgtggagcgggacaggagagaatgatgagcatcaatgaagaggtctgcggcaaaaagagccgtggcaggccgaaacaatttgatcgcgaccgggcgctggaaagcgcgctcgatctgttctggcggcacggctatgaagccacctcgctggccgatctggtggaagtgaccggcgccaaagcgccaacgctgtatgcggaattcggcaacaaggaagggatgttccgcgcggcggtggaacgctatctgcaaaaatacaccacctgcaccaaccaactgttggaacaggcgttgccggtagccgagatcgtcgaggcctacgtgcgttcttccgtcgaagtgtttaccgatcccgatacgccgtcaggttgttttatggtgtgcgcctccgccgcgctgtcgtccgcgtccgacgacgtcgcccagatgctgcgcaaaaaacatcatgcccaggaagcggcgctgaaagcctgtttcgatcgcaaggtgcagcagggggaactgctggcgaagaccgacaccgcgctgctggcgaaatacgtcatttgcaccattgaaggcatgtcggtgcaggcgcgcgaaggggcaagccgcagcgatctgctgcggttgctggaggcgttgatgctggtgtggccgcggctcagccagattggcaataaggtgtgacaaccggcccggcttttaccgggccgtttaacccattactgattgaccgggatcaccgcgccctggtacttctcgcgaataaagtcctgaatcggttttgagtgcagcactttgaccagcgccacgatctccggcttgttcacgtcggctttgtgcacggtgatgatgttggcgtacgggttgttttcgccgctttcgaccgcgatcggatccttggtcggattcagcccggcgtcgatggcgtagttggcgttgatcaccaccgcgtcgccttcgttgttgttatacatctgtggcagcagcgcgccctcaacgttggcctggaacttcaggtgtttcgggttttccaccacgtcggtgatgcgcgcgtccactttgctcacccccggcttcagcttgatcacgccttcccgttcaaaaatagacaggatgcggccttcttccgccaccgcgtcgcgcatgatgattttgccgttttccggcagatctttcaggctcttgtacttcttcgagtagataccgataggctcaatatggatcgcgccggcgctgacgaagtcgtagctcttgtcgtcggcgtggtctttcagcaccgagttcaggtaaggcacgtgctggaaatagttggcgtcaatgtcatggctggccagcgcagtgttcggcaggatgtagtcctggaagcgcttgatctgcagatcgatgccttcttttgccagtatcggtttagcctgttcgaggatctcggcgtgcggcacgttggaggcgccgaccaccagcttggtcgccgcggcggcgccaaaagaagccagagtggcgacggaggcgaaagccaacatcagtaggtgctttttcatcatcgttttccttggttaattaacgtttatcgagcgttcttgtcagggtgtcgccaatgaactgaatgacgaaaacgatcagcaggatcgtcagcgtcgccaccagcgtcacgtcactgtggttgcgttggaagccttccagataggccaggttgcccaggccgccggcgccgatcaccccggccatcgcggtgtagctcaccagtgcgattagggtgacggtgatgccggaaaccagcgccggcgagctttccggcagcaatacgcggaaaatcagggtgcggtttttggcgcccatcgagcgcgccgcttcgatcactcctttgtcgacctcgcgcagcgcgatctccaccagccgggcatagaacggcgccgcgccgacgatcagcgccggcagggccgcatccgcgccgagaatggtgccgataagcgacttggtgaacgggatcagcagcacgatcagaatgatgaacggaatggagcggaagacgttgaccaacacggagatcagcgagtagaccgcccggttctgcaacagctggcccttcgaggttaaaaacagcagcacgccgagcacgatgcccagcaccagcgtggccaaaccggcgatgccggtcatgtacagcgtttcccaggtggcgtcccacagttggtccagacgcaggtgggggaacagggattcaatcatgttggataacctcgacggcgatgtctctttcgttcagcaacttgagcatgtcggcgacttgttgttcgttgccttcggcgtggatgtacagttcgccgaacgaaccgttgagggtgtggctgatcttgccgtgcagaatgttgatggtcagggcgtagcgccggatcacttcagaaatcaccgcctgatgggtttgcacgccgacgaaggtcaacttgaaaatcgcccccggcaggtgggcggtgagctgcgggttgaagctctcttcggtgtccgcatactgcgacacctgtttgacgaactgccgggtgatcggctgctgcggccgggtgaacacgtcgagcaccgggccttcttcgacgatgcggccgttttccatcaccgccacgcggtggcagattttgcgcaccacgtgcatctcgtgggtgatcagcacgatggtcaatttcagctgacggttgatgtccaacagcaggtcgagaatggcgtcggtggtctgcggatcgagcgccgaggtggcctcgtcgcacagcagcacgctcgggttattggccagcgcgcgggcgatgccgacgcgctgcttttggccgccgctgagctgcgacgggtaggcgttttcgcgcccctgcaggccgaccagcgcgatcagttccgccacgcgcggcgcaatctgcgccttgggcacgccggcgatctgcatggaaaacgcgatgttctggctgacggtgcgcgaccacagcagattgaagtgctgaaacaccatgctgattttcagccgcgcctggcgcagatggctgcctttggcgcgggcgatatcgaagccgccgacgtcgatgcggccgctggtgggcgtttccaggccgttgagcaggcggatgagggtgcttttgccggcgccgctgtagccgatgatgccgtaaatttgcccggcctctaccgccaggctgacgttgtctaccgctacgacgcggccctgtgtgctgtcaaaagttttgcaaacgttcgaaagaacgatcatagcgaagcggatccttatcgatacatcacagcattccgtccagagcgcggtgcgccggacagagatcgttcggcttttcggctgacggaacctctgttgcgggtgaataccgggcaatcctaccgagggttgatagtgacaggaagaatgtaaaatctattacttattctgatttgatatataaggcggcgggggaggcgggggaagaaaaccggccgcagggcggccggcgagattgatgacaaaccttatacccttgctgggttggcagagagcaccgaataaaaaacaaggaaaatcaatttattgattttcggctgatcaccacaaagaggggaaaaaccacgctttttcccctctttgtcaatagactgaccggccgcagggcggccggcggagggctagcgtttgtccagcttcatgtgcagcagcggaaacgggttgccctggccgtcgagcggcgagcggccggtgatgacaaacccgtagtggcggtagaagccgctggcctgcggattttgctcgttcacgtccagctgcagctcatcgtgcagcgtttccgcgtgggtcagcagcgctttgcccacccctttgccgcgctgatccgcgtcgataaacaacatctccaccttgttgccgttcaggccgataaagccgcagggatgccccgggcgttcttcggccacccaaacgttgaccgccggcaggtagtcgttcagcaccagcgggaacagctgcgcgatgttgtcttcggttaaaaaatggtgggtggcgcgcaccgaacgcagccagatatctgccaattgcgcgttgtcttccgccgcgcgtgctctgatggtaatcatcgaactctctgctatctaagttgaaggaaaagaaactagatagaggttttgtggggttagtgccgaattaacgtgggttaacgccctgcaaagcgcctctgcagtggatcgaataggcccgccttctcgcaagcggtataacaactgtaattcagcaagttaatgctttcaaccgccgcagggcgcaatgaggcgctcgccgcgtgttacactggccgctgaatgagcaagagggcggcaggatggaagcggtacgcgcagcgatagagaaacaggtgctcagcctcaccgggctggcgctcggcggcgtcgattttgagaatccgcccggcgatccggggctgttcggcccgcagtctgtcatctggcaggtacatcgcgatttcacgccgatgctgtgcggcggcgtcagcgccttgctgctgcaaatgctgcacccgctggcgctggccggcgtatgggatcactccaattttcgcgacgatatgatcggccgcctgcgccgcaccagccagttcgtgtcggtcaccaccttcggcccgaccgccgaggcggagcggctgatcgccaaagtcaaagccatccatctgcgggtaaccggcgtcggcggcgacggcacgccttatgccgccagcgatccggcgctgctgacctgggtgcacgtggcggagagcagccgctttctggccagccacctgcgctaccgtaacccccatctttcccgcgatttgcaggatcaatactatcgtgaagcggcgcgcgtggccgccgcgctgggggcgacggcaattcctcagtcctgcgcggaggtcgaagaatacctgcaggcgatgcggccgcagctggtgtgtgatgaacgcacgcaagaggtggcgcgcattctgctgaaggcgccggcgccgagcgcattggcgcgccccctcggcggggtggtgatgcaggcgggcatcgatctgttacccgattgggcgcagcggcagttcggttttcatccgggtgcgctgcggcggcggctggtgcgaacgggcgccgccggtttgggcaaggtgctgggcgcgtcgatgcgcaacggttcctatcagcgtgcggtgcggcgcatcactcagccatcatgagccgcagccgctataattagcctttgtttatcttcgtttacggccgtttttgagacttttacgggtgatccggccagtaatgcgttttacacttggggcaaagccacattccatttttggcgcgcagccgattctgccgcgccctgaccctattgaggtgatatgaacgagtcatacgtacttgctgaagtcagcaatgagaaccagacgctggtcgcggtggttcagcaagatcaccgggcagcctatttttatatctatcccgccgaagcctacagcgatcgctatcaggtgcgcgcctgttggctgcgcaatctggccgccgcgccgctgcaggaagatcgcgccgcgctggaacaagggcagccgccgatgctggcggcggagtattgccgcaacctggaaggggaagcgccgctgaacccggaagggctgatggtggtgtggagcgaaagcgacgacggcgcggccctgtggtattacggccaactgttggcggtgatccccggctggagcctgtatatcgatcattcggtgtgctattcggccagctgtatcaaggagagcccactggcctatccgctcggttcggcctcgaccaacacccaatatgcgctggcggaaagcacccgccagttttggcgcagctggcagcgtgaagagggcaatccgtggccgaagatgcagcgcgattttcaggcgcgctatgagccgcatttcggcccttcggtaaaatactacgccatcgatcagggcaagtggccgccgatggccatcacccagcacgaacgcgacggcatctattacttcctcaccatgggggtcagcatccggccgatgccgtgggtggagatcctgttcaacgacgaggcttcgcgctatcgccgcatggagatggcgatcgccatcgacagtcaatacatgaccgaagacaacgcggtgcagatggccagcgcgctggccggtttcgctcatgcgccgtgggcgcggctgacctggatcggcgaaggacatacgctggagtccgacgtggcgccgctgggctatgagggctatattttatcgtcgtccttctacccgcatcacgcgcacctggctctgccgcagcagtatggcgatccggttaacctgttctgggccagcccggtgtttgccgccgagcgccaattggcgcacgccacgccgaatggcgggcacgatctggtgcacaggctgcgcgagcagggcgtcgaccatattttccgcccgcgccagccggtgtgctgacgcgcttatcttttcttcaggagccgccatgaccaccgcgctattgattatcgatgtgcaggaagggttgtttacgccgccgccggcggatgccgcgggcaccgttgcgcgcatcaatcagctgagcgagcgcgcccgccgggccggtgcgccggttgtcgtcattcagcaccatacgccggacgatgagttgccgcacggcagcgccgcctggcaagtgctcgcggcgctgacggtggcgccgggcgaccatcgggtggagaaaaccacgccggactcgttcctgcgcacctcgctcggcgcgttactgatcgccaacggcgtatcgcagctggtggtgtgcggctactccacgccgttttgcatcgataccacggtgcgcagcgcggcggcgcgcggctatccggtgacgctggcggcggatgcgcatacctgccacgacaaatcctatgccgacggcctgctgatccgcacccaccataacgagacgctgtcgaatatcgacagcttcggcgtgccgatccgcgcggtgcccgcggcggacattgtgttctgagaacggaaaacgggggccaatgcccccgttcgttatttcaggcccgcccgccgcgccgccaccttggccagcgccgcccagtccagatccgcatccccctgcgccatcgcgtcgaggaagttgtctttcagcaccccggcgaacggcatcggcgtatggctgtcggcgccggcggccagcgccagcccgacgtccttcagccccagcgccagccggaatccggcgggtgaatacttctcggcggcgatcagcgcgccatagccctgataggccggggcggcgaagacggtgctgctcagcatctgcaggtagtcggcgccggacacgccgtagttgcgtaccagcgcgctgccttcccccatcgcttcaatggcgctggccaaggtaaagttggtggcgattttgaccacgttagcctgcgccggatcggcaccgaagtgccaggttttctggccaagggcatcgaacagcggctgcgcttgcttcagccgctcgctatcgccggccgccagaatattcagcttgccggcggccgccacgtcgacccgccccagcaccggcgcggcgagatagccgatgccgtgttccgcatgcagcgtcgtcaggcgtttggcgagttcgaccgagatggtcgccatattgatatgcagcgcgcccggtttcatctgttgcagcaatccgctgtccaccaccacctgttgcgtggcggcatcgtcggccagcatggtgatcagcacgtcgacatcggccaactgttccggccgttcggcctgccgcgcgccggcgctcaccagcggctgcgccgcctgcggcgagcggttccataccgttaaggcgaagcccgcctgcaacaggttggccgccatggcgctgcccatcccacccagtccggcaaatccgatcttcatcatgcgctcctttttcaggttgaaggttttaccctagcgcgccgggccaggaacgcaaatgccggagtgtaacgtcgtcttacgcaccggcggcgggttattgacgcgctgccgcagcgggtataccttgatgccatgaatatatcgatgcactccacccacaatcagtcatggtggcgcctcttctgaggcggcacgagtattcacatctctttttaatgccgccggtttggcggcattattttttgtggcgttgatccggcggtctacagaccttcaggagcactgtcatgagctacaccattcttaccggcgatcgcgccaccggcccactgcatttaggccacttcgtcggctcgctgcgccagcgcgtggaactgcagcaccagcataaccaaacggtgatggtggcggatctgcagggcctgaccgataacggcaacaacccgcaaaaaatcagcgccaacgtgctcaacgtggtggccgactatctggcggtcggcatcgatccgtacaagaccaccatttgcctgcagtcggcgctgccggcgttggccgagctgacgatgtactacctcaatctggtcagcgtggcgcggctggaacgcaacccgacggtgaaaaacgaaatcgccgagaaggatttcgcccgcagcctgccggccggctttttgatctatcctgtcagccaggcggcggacatcaccgccttcggcgccacccacgtgccggttggcgaggatcagctgccgatgttggagcaaaccaacgagatcgtgcggcgcttcaaccacatcgtcggccaaccggtgctgacggagtgccagccgctgttaagcaacgtcgggcgtctgccggggctggacgggcagggcaaaatgtcgaaatcacgcggcaacgccatcccgcttggcgccggcgccgacgaggtgcacaaggcggtgatgagcatgttcaccgatcccggccatctcaacgtcagcgatcccggccgggtggagggcaacatggtgttcacctatctggacgccttctgcgaagacgccgcgctggtggcggagctgaaggcgcactaccggcgcggcgggttgggggacgtgaaaatcaaacggctgctggaggattgcctgcagagcctgctcgagccgatccgcacccgccgcgccgaattcatcgccgataaaggcgagctgacgcgcatcctgcagcatggcacccgccgcgcgcatcaggtcagccggcagacgctgcagcaggtcaaggcggcgctggggctggacttctttagcctggaatgatgcgcacgccggggcggcacgcgtcacgccccggccataaaaccatcatcccactgtcataaacttattcgttaataggtgcccataatgattagccactgaaaccagagaaatcatatggctcaggcactgttaaaattggcgcagcacgagttcccagggcagcacgccgccgcatcccgcaaagtgttatcggtaaaggggctcggtaaggcctataaagcgcagcagcgcgtgctggatgacatcaatttcgatctgcacgccggcgagttcgtggcggtgatcggccgttccggcgcaggcaagtccacgctgctgcataccctcaacggcaccattccttccagctgcggcgagatgctgcacttcgaagacgatggcgtggcgcaggatatcgcccagcttgccggccgccagatgcgccagtggcgcgcgcgctgcggcatgatcttccaggacttctgcctggtgccgcggctggacgtgatgaccaacgtgctgctggggcgcctgagccacacctccaccctgaaatccttcttcaaactgttcgatgacgccgaccgcgctcgcgccatcgagctgttgcagtggctcaacatgctgccgcacgcgctgcagcgcgccgagcacctctccggcggccagatgcagcgcgtcgccatctgccgcgcgctgatgcaaaatccgcaaatcctgctggccgatgagccggtggcgtcgctcgatccgaaaaacacccgccgcatcatggacgcgctgcagaaaatcagcgaagacggcatcgcggtgatggtgaacctgcactcggtcgaactggtgaaagagtattgctcgcgggtgatcggcatcgcccacgggaagatcgtgtttgacgggcatccttcgcaactgaacgagcggatcctgcaccagctgtatggcgaagaagccaatcagatccattgaagcacttttgacctttaccctttacacacaaggcacacctaatgaaaaaagtattgagtctgaccaccctgatggccggcgcgatgatggtctttaatgctgccgcagcggatgcgccgaaagagctgaacctgggcattctcggcggccagaacgccacccagcagatcggcgataaccagtgcgtgaagcagttcctggataaagagttgaacgtcgataccaagctgcgcaactcgtccgactattccggcgtgatccagggcctgctgggcggcaagattgacctggtgctgagcatgtcgccgtcgtcgttcgcctcggtctacatcaaggatccgaaagcggtggacatcgtcggcatcgcggtcgacgacgtcgaccagtcgcgcggctaccactcggtggtggtggtgaaggccggcagcccataccagaaactggaagacctgaagggcaaggccatcggcttcgccgatccggactccacctccggcttcctgatcccgaaccaggcgtttaaaaagctgttcggcggcacggtcgacaacaaatacaacaacaccttctccagcgtcaccttctccggcggccacgagcaggacatcctcggcgtgctgaacggccagtttgaaggcgcggtgacctgggcgtcgatgatcggcgactacaacaccggctacaccagcggcgcgttcacccgcatgatccgcatggatcacccggacctgatgaaacagatccgcatcatctggcagtcgccgctgatcccgaacggcccgatcctggtgagcaactcgctgccggccgactttaaggccaaagtggtcaccgccatcaagaagctggataaagacgatcacgcgtgctttatcaaagcgatgggcggcaaacagcacatcggcgacaccaccctggcggaataccagaccatcatcgatatgaagcgcgagctgaccaaaggcgaccgttgattcccggctgcctcggccgcccgaatgaaggggttcagcatgctgaaccccttgttccataacgatggaagacctgttttgaataccgatttcgcacactattaccaacggatccgcagcaagcaaaagcgcgaagcgctgctgtggtcgctcgggctggtggtgctgtacctgggcgccggcaacctcgccgagttcaacctgcacaccgtctgggtgtctattccgcacttcttcgactatctggccgaaaccgtgccgacgctgcactggcacctgctgttcgccgacgggcgcaccgaaggctcgctggcctattggggctatcgcctgaacatccagttgccgctgatctgggagaccctgcagctggcgctggcggcgaccattttttcggtgctggtggcgaccgtgctggcgttcctggcggccggcaacacctatactccggcctcggtgcggctggcgatccgcacgctggtggcgtttctgcgcaccatgccggagctggcgtgggcggtgatgttcgtgatggcgttcggcatcggcgccattcccggcttcctggcgctggcgctgcacaccatcggcagcctgaccaagctgttctacgaatcgatcgaaaccgcctccaacaaaccggtgcgcgggctggcggcctgcggcgccacgccgctgcagcgcatgcgctttggcctgtggccgcaggtgaagccggtgtttctctcctacagcttcatgcggctggagatcaactttcgccagtcgaccattttggggctggtgggggcgggcggcatcggccaggagctgatgaccaacattaaactcgaccgctacgatcaggtcagcatgacgctgctgctgatcatcgtggtggtttccgtgctcgactatgtgtcgggcgagctgcgcaagcgcgtggtggagggggcaaaatgacagcgggcaccccggcgtcggcggaaacgctgagccagctaaaacagcagcatccggcgatcttcgcgcagcaggggcgttacctgcgcaccgtcggcctgatcgccttggcgatcgtgctgtactacgtgttcttcttcctggtcttcggcattagttggccgcagtttatcaacggctgccagcagctggggcgctatttcctgcgcatgttcgtctggcatgacttcgccaactggccgttcatgtactacttccagcagattggcatcaccatcgccatcgtgtttgccggcaccatcaccgcgtcgctgatcgcgctgccgctgtcgttcttcgccgcgcgcaacgtgatgtcgacgccgttgctgcggccaatttcggtgctggtgcgccgcttgctggacgtgctgcgcggtatcgatatggcgatctgggggctgatcttcgtgcgcgccgtcggcatggggccgctggccggggtgttggctatcgtgatgcaggatgtcgggctgctgggcaaactgtacgccgaagggcacgaggcggtggacaagtccccgagccgcggcctgacggcggtgggcgccaacgggttgcagaagcaccgctacggcatcttcacccagtcgttccccaccttcctggcgctcagcctgtaccagatcgaatccaacacccgctctgcggcggtgctgggtttcgtcggtgccggcggcatcggcctggtgtacgcggagaacatgcggctgtggaactgggacgtggtgatgttcatcaccctgatcctggtggtggtggtggtggtgatgatcatggacaaggtctcgtcgctgctgcgcaacaagtacatcatcggcgaagacatcccgctgtatcagcaaaaaagccaaatcgattgagaaaccccttgccgatccctatactgccgcacattcaaggtgtgcggccatacccgtcatacttggagctgcctctttgttggctgcatttgcgcgccccggtcacatagttaactatgctccgggggcttacaaatttgccgccgcgatgcaactccaattattttgggtatggggcatttttttacaatgcgcacgtccccgttagacaaataaggcaatgcaatcccatgatgaacaacgacgtgctgcgcagcgtgcgctatatgctgagcattaacaacgccaaaatggtcgagattatcaaactggacgatttcgaggtggcggtgtcggcgatggacgcttacgtgatcaaagaaggcgagccgggctacgagaagtgcccggacgaagtgatggcgcacttcctcaacggcctggtgttcttcaaacgcggcaaggacgacaagttcccggcgccggcggttgagctgccaatcaccaacaacctggtgctgaaaaagctgcgcgtggcgttcgagctgaaagacaccgacatgcaccagattttcaccgcggtggatttccgcatctccaagccggagttgagcgcgctgttccgcaaggagggcaccaagaactaccgcccgtgcggcgatcagatgctgcgctacttcctcaaagggctggcgcagcgcgttcgcggcgagtaacgcgtagcgttcaccgaacatcaggcgcaatcgcaaggttgcgccttttttattgccgctctcccgcccgccgttgttgtacaggccctcagccatccgtcatcgatggagggcgtgccgcctatccggttactttttcatggtcaattcaatcacccaaaccatgaggaaagcaggatgccaaccatcacgaaaacccaatcactttacacgttgacccggcctgtctggctggatgcggcaggcatgagcaaaggcatcgatcacgatcgccagcacctgggcatcattctcgccgccgggcaggtgctgcgagtgcgccagaccaacgcggcgtttaccggcaagctcacgctgcgtttgctgaatgacgacagcaaaacggaggcggaattcagcgttggcgcgagctgggtcgaggcccaggtcaatgccgtctcggtgccgttcatcgatacgccgtatgggcagggcgagccggtgctggagttcgagtacccggacacggcgaaagcgctgccggtttatcgccgtggcgaaaacgaagccgcgttctttgcccgctgggacgatcgggacgccgagtttgccctggtcgatgcggagtacgcagtgttgctggtgccgaaaatcagtaaaccggcgctgaagtcgctgggcgacgcgaaaaacatcgacgggctgatcgcctactacgatcgcattttcactttctacaatgcgctgaccggcgtctcgttcgaggctgaacacgaatccgatcgcaatattcgcaaccgctactttatgaaggccgataagcatggcgccggcgccgcgtattacggcggccgctggacggcggaaaccagcaactcggtcagcagcttctggctgacgccgaaagacagcaactggggcagcctgcatgagatcgcgcacggctatcaggggcactttatgggcgacaaatatttctccaccggtgagatgtggaacaatatttatgccgcttgctatcaggacgtgatgctgggggaacgcaaataccaggaggggtggctgtataactacggcaacgcggccggcgtcgagaagaaaatcatcgatctgatcgctcagggcacgccgctcaaccagtgggatctgcgctccaagctgttcttcgcgatgctgatggtcgacaaggcaggcaagaacgccttcacgcactttaatcagcaatatcgtcaaagctgcaacacgccgggcttcgtgccgtcggaacatgccttgctggatctgctgtcggcaagcttcgccgcggccggtgagcagatcgacgtgacgccgttcgtcgagctgaccggcggcgtgatcacccaagcgcagcgcgatcgcaacgcgttcagccacgccaaggcggtgtatccgctgtatcaactggtggacgcgcagagtctgccggcggtgcaggcgcagctgaaactggattcctcgctgcggctggtcgattcctgccagctcaaggccagcgggctgaaaggcgacgtcaccctgagtctggatatcgatgactttgcgcagatctacggtgaagacctgatcctgatggaaggggcgcgctatgcccacaaagtccgtatcgacacgccgaccttggcgctgaccgcgctgccggtcggcgtgtataccttgcggttgccgaccggtaaagatcgtaaatatcggccgacggcggaatacctgacggtgaaacaggggaaaaacgcggtgacgcttcgctttgagcgcaaagccgcttcgccgatcgtttctcaggagatcaatctgttgggcctgagcgatgcggtctttgccaccgtggtcgtcgatcgcgccaaaggagcggtggtggttgacgtgaccagcaccacgccgcacgcctacttcccgggtgaaacctatgcacgggtgacgctgcgcgatcggcagggcgcggtgcgcttcagcaaggagattcagggcactcaggctaccttaagtcatgacgagctgccgtttgccgagggcgatgacatcgagatttaccatgtggagccgagtcgggtgcgcctgaatccggcggcgaccggggttatcgataataaaaacaaaaccaacgtgctgcgtatcgaaaaaagcgggctgaaaaacccggcgctgtccggcgatcctgaacaagcgctgctggcgcgcctggaacaggcggcgcagcgtttgcgccatctgctgccggcttactatgcgccatcatcgtcgttcaaagatgatatttatctggcgatcggcgcctttgccgagccgcagcgcgagtcactgttggcgacctatcgggattgcctgccggccgacaatacgccgccgggtgccaacgtcggcaatgcgtttaccgtggctgccaaagggatcggcgatcgccagttcctgaccggcgccatcgatctggtgaagaaaaccgttactgtcacgctggcggcggggattgctcaccactactttgccgacagctacgccttcctcagcgtgacggatgcggacggcaatgtcttgctcagttacgacgtcatcggcagccagaatcaaccggccaaaacctgggtgttgccgctgtcgggttacggcggtgaagtgattcaactgcggcatgaagagccggacaaccgcttggcgatcgtcaacgaaatgcagcacctgcggctgacggagaagggcaagcaacagacctactgcattacgccggtcggtttgaaacgcatcaacgactgatccccatcggcctgcggggcggcgagtgtcgccgccccggtttttcctctgcgtcatcccgccattgcactctttttgttcttccgctgcgcaccgctggtgcagcccgtttcccgccgctgtcataagttttaattataatttattgaaatcatgagattaaaaattggcacgacggttgctctgttggatcccatcttgtgtaccagatggaattcagccgatgagcgaacctgttgaagcgtgcggttttaccctcagtgaatggcagcaccattatcaaacccgtccggcgggcgagcgccttgcctgcgtcagtgcgacgatcgaaacgctggtcgccggcctgaacccggacgataacgcctggctgtatctcgccacgtcggcgcagcgcgagcagcagtatcggcagctggcgcagaggctcgaagcggtcgccggcgatctcagccgcctgccgctgttcggcgtgccctttgccatcaaagacaatatcgacgtcggcggctggccgaccagcgccgcctgcccggcgttcacctatcaggccgcggcggacgccaccgtggtcgcccacctgcgcgccgccggggcgatcgccctcggtaaaaccaacctcgaccagttcgctaccgggttggtgggcacccgctcaccttatggcgcggtggtcaacagcttcgccagccgctacgtcagcggcggttccagttccggctccgcttcggtggtggcgcgcggcctggtgccgttcgcgctgggcaccgataccgccggttcggggcgcgtgcccgccgggttcaacaacatcgtcgggctgaagccgaccaaagggcggttgtccaatcgcggcgtggtgccggcctgccggttgaacgacaccgtttcgatcttcgcgctgacggtggccgatgccgcgcaggtggcggagctggcgagcggctttgacgcggcagatccgtattcccgcgccgatccgcataccgcgccggcggatatccccgccgcgccgcgtttcgccgttcccgcccagctggagtttttcggcgacgtgcaggccgagcgggcgtttcaccgagcgctggcgcagctgcaggcgggcggcgccacgctggaacccctcgatttcgcgccgtttcgcactctggcggaacagctgtattacggcccctgggtagcggagcgcacggtagccattgagcaggtgctggaagcgaacccgcaggctatcgatccggtggtgcgcggcatcgttggtaacggcctcggctacagcgcctgcgacgcctacaaggcggaatacctgcgcgccgagctggcgcggcagatcgcccagcggctggcgccgttcgacgcgctggtggtgccgaccgcgcccactatccgcaccctggcggagatggcgcaggaaccggtgctgttcaattcgcagttcggcacttacaccaatttcaccaacctggccgatctgagcgcgctggcgctgccgggaccgctgcgcgaagacggtctgccggcgggcatcaccctgattgcgcccgcctggcatgaccgggcgctggcggcgtttggcctgcgctggcaacggcaaagcgccttgccgctcggcgctatcggccgggcattgccgccgcagccggcgccggccccgtcttcgggacacgtgcgtctggcggtagtaggcgctcaccttagcggcatgccgctcaacgcccagctgacgcagcgcgacgcggtgtgggtagagcaaaccgtcaccgccccctgttatcgcctctacgcgctggccgataccgatccgccgaagccggggctggcgcgcgcggcgcagggggcggcgatccgcgtagagctgtgggacatcccgctggcccgtttcggcgagtttgtggcggaaatcccggcgccattgggcatcggcacgctgctgctggcggacggccggcgggtgaaggggtttatctgcgaagcctgggcgctggaaggcgccacggatatcactgagtttggcggctggcgcgactatctcgccagcgttaagggggcatgaacatgtttactaccgtactgatcgctaaccgcggcgaaattgcctgccgcgccattcgcaccctgaaacgcctgggcgtcaccagcgtggcggtctattccgacgccgaccgcaatgcgccgcacgtcaccgaggccgacagggcggtggcgctcggcggcgacaaggccgccgacagttacctgcgcatcgacaagatcctcgcggccgcggcggccaccggcgcgcaggcgatctaccccggatacggctttttgtccgagagcgccgagtttgccgacgcctgcgaggcggcgggcattgcctttatcggcccgacggcggcgcagatgcgcgagttcggcctcaagcaccgggcgcgcgagctggcggcgttggccggggtgccgatgacgccgggtaccggcttgctggagagcattgagcaggcggtcgccgccgccgcgcgcatcggctacccggtgatgctgaaaagcaccgccggcggtggcggcatcggcctgacgcgctgtgacgacgaggcggcgctgcgcgacgcctacgacagcgtcaaacggctgggggagcagttcttccgcgacgccggcgcctttatcgaacgcttcgtcgatcgggcgcgccacgtcgaggtgcagattttcggcgatggccaggggcaggtggcggcgctcggcgagcgcgactgttcactgcagcgccgcaaccaaaaggtggtggaggaaaccccggcgccgcatctgccggcggcgacccgccaggcgctgcatcgggcggcggtggcgctgggcgagtcggtgaattaccgcagcgccggcacggtggagttcatttacgacgccgcgcgcgacgagttttatttcctggaagtgaacacccgcttacaggtagagcacccggttaccgagatggtcaccggcctggatctgatcgcatgcatgctgcaggtggcggcgggtgacgcgctggattgggcggcgttgcgccgcgcgccgcagggcgcggcgatcgaggtgcgcctctatgccgaagatccgctgaaaaacttccagcccagccccggcgtgctgaccgaggtgcatttccctgacgacgtgcgcctcgacggctgggtggcgaccggcagcgaagtttcggcgttttacgacccgatgatcgccaagctgatcgtgcacggcgccgatcgggcgcaggcgctggaaaaactgcgcgtggcgctggcggcgacccgtttgcacggcatcgccaccaacctcgactatctgcggcaggtgatcgccacgccgcaatttcagcgcggcgacgtctggacgcgcctgctggacgatttgcgtttccagccgcactgcctcgaagtgctgcaacccggcacctacagcagcgtgcaggattatcccggccgcctcggctattgggacatcggcgtgccgccgtccggcccgatggacgacttcgcgtttcggctggccaaccgcatcgtcggcaaccacccggcggcggccgggctggagtttaccctgcaggggccgacgctgcgctttcactgcgacgccaccatcgcgctgacgggcgccagctgcccggccgatctggacggcgaggcggttgcgtattggcggccgattacggtgcgggccgggcaggtgctgacgctggggcgcgctacgcacggctgccgtacctatctggcggtgcgtaacggcttcgacgtgccggtatatctcggcagccgctctaccttcgcgctcgggcagttcggcggccacgccgggcgcaccttgcgcgtggcggacatgctggcgatcgcccaaccggcgctggcggccagcaccacgccggcgccgatcgccgcgccgcaggcgatggacgacagcctgatcccgcactacggcgatcaatggcacatcggcgtgctgtacgggccgcacggcgcgccggactttttcaccgccgaatcgatagaggccttcttcgccaccgactggcaggtgcattacaactccaaccgcctcggcgtgcgcctggcggggccgaagcccgagtgggcgcgggaggacggcggcgaagccggtttgcacccttccaacgtgcacgactgcgagtacgccatcggcgcgatcaacttcaccggcgacttcccggtgatcctgacccgcgatgggccgagcctcggcggcttcgtctgcccggtgaccattgccaaggccgaactgtggaaagtggggcaggtgaagccgggcgaccgcatccgtttccatccgatcggcttccggcaggcgcagtcgctggagcaggcgcagctcggcagcatcgaagcgctggcggcggtgaaggccatcaccctgccgccgccggatctggccccggcggagaccgtttccgccgcggtgctggcagcgctgccggcggcggaggggcgcccggcggtggcgtatcgccaggcgggggacggctacatcctgatggagtacggcgacaacgtgctcgatctggcgctgcgcctgcgcattcatctgctgatgcagtcgctgcgtgaggaggcgataccgggcgtggcggagctgtctccgggcgtgcgttcgctgcagatccgctacgacagccggcagattagccaggccgacctgctgcagcgcctgctggcgcgcgaacgggcgctgggggacgtcagccgcctgaaggtgccgacgcgcaccgtctggctgccgatggcgtttgaggattcggccacgctgggggcggtggatcgctatcagcagacggtgcgcgcctcggcgccctggctgccgaacaacgtcgatttcattcagcgcatcaacggcctgagccgacgcgagcaggtgcgcgacattctgttcgacgccagctacctgatcctcgggctgggggacgtgtacctcggcgcgccctgcgcggtgccgctcgatccgcgccatcgcctgctgagctccaaatacaacccggcgcgcacccataccgccgaagggacggtcggcatcggcggcatgtacatgtgcatctacggcatggactcgccgggcggttaccagctggtggggcgcacgctgccgatctggaacaaattcctcaaaaacccgcagttcaccgccggtgagccctggctgctgcgctttttcgatcaggtgcgcttctacccggtcagcgagcaagagttggacgagcagcgcgaagcgttccgcgaagggcgcatgcaggtgcgcatcgacgagagcgagttcgacttcgccgcctacacccgtttcctggccgacaacgccggggcgatcgccgacttccagcatcgccagcagcaggcgttcagcgccgaagtggcgcgctggcgcagcgatgacgacgaggccgaggcgcagctgttgcagccggaggaagaagacgccatcgacggcgatctggtcagcgccgatctgaacggcagcgtgtggaagatcttggtggaaccggggcaggcggtggcggccgggcagccgctgatcgtggtcgaggcgatgaaaatggagctggcggtcaccgcgccgcgcgccgggatcgttaagcgcatcagctgccggcaggggcggccggtcgggccgggcgacgccctgctgtggctggaaaaggcggtctgaacggagaagcgatgatgcaaatcaccaacggagagcacaaggcgcgcccggaggggctggcggagcgcatttatctgcagctcaaggccgacattttcgagtttcgcctgctgccgggcgatcgcttcagcgaaagcgaggtggcgcagcgcatggcggccagccgcacgccggtgcgccaggcgctgtttcggctggagcgcgaaggctatgtcgaggtgctgtttcgcagcggctggcaggtgcggccgttcgatttcgcctacttcgaagagctgtacgacctgcgcatcgtgctggaacaagaggcggtgaaacggctgtgcgaacgcccggccggggaaacgccaggcgcgctggcggcgctgagccgtttttgggccgaagcgccgcgcctggcggacggcaaggcggtgtcgcagcacgatgagcagtttcatcaggcgttagtggccgcggcgggcaacggcgaaatggcgcgcattcaccgcgaactgaccgaaaaaatccgcatcattcgccggctggatttcacccagcaggcgcgggtggacgccacctaccgcgaacacgccgccattttgcaggcgatcctgcagcggcaaagcggggcggcgcaaacgctgctcggcgagcatatcgccgtcagcaaggcagaggtacgaaaaataacgctgcacatgttgcaccaggcgcgggctcagcagcctgtgcgctcggcgtaacgattttgatttcacacacatcaggagtttgaactatgcaacgtcgtcgttttatcaaagcttttgcgctgtccgccgccgcgatcggcatgggcctggcctggagcgcgcaggccgccgacaccatcaaggtcggtattctgagttcgctctccggcaccatggcgatttccgagacgccgctgaaggatgtggcgctgatgaccatcgacgagatcaacgccaaaggcggggtgctcggcaaaaagctggagccggtggtggtggatccggcctccaactggccgctgttcgccgaaaaggcgcgccagctgctgagccaggacaaggtggcggcggtgttcggctgctggacttcggtgtcgcgcaagtcggtgctgccggtgtttgaggagctgaacggactgttgttctatccggtgcaatacgaaggtgaagagatgtcgccaaatgtgttctacaccggcgcggcgccgaaccagcaggcgatcccggcggtggaatacctgctgagcgaggacggcggcggcgccaagcgcttcttcctgttgggcaccgattacgtctatccgcgcaccaccaacaagatcctacgcgccttcctacacagcaaaggcgtgcaggacaaggatatcgaagaggtctatacgccgttcggctacagcgattaccagaccatcgtcgccaacatcaagaagttcgccgccggcggcaacaccgcggtgatctccaccatcaacggcgattccaacgtgccgttctacaaagaactcgccaaccaaggcgtcaaggccaccgacgtgccggtgatcgccttctcggtcggcgaggaagagctgcgcggcatcgacaccaaaccgctggtgggcaacctggcggcctggaactacttcgaatcgctggataacccgaccaataaacagtttgtcagccagtggaaagcctacgccaaggcgcacaatctgccgaattacgccaccgcggtgaccaacgatccgatggaagccacttacgtaggcctgcacatgtgggcgcaggcggtggaaaaggccggcaccaccgacgtcgataaggtgcgcgcggcgatggccgggcaaaccttcgccgcgccgtcgggcttcacgctgaccatggacaaaaccaaccaccacctgcacaaaccggtgatgatcggcgagatcgagagcaacggccagttcaacgtggtgtggcagaccgaagcgccggtgcgtgcgcagccgtggagcccgtatatcgccggcaacgacaaaaaaccggattacccggtgaaaggcggcaagtaacgtcactcagcgccggcgcggctcgacgcgcgccggcccaacagaagaggcagctgatgcaatctccgtttttatcctctctgcgcgccgggctgtggctattgtgcgcctggcccctgctggcgcaggccgggccggccgatgagttcgcggcggccactcgcgcgcagcaggccaaactgctgcaggcgtgggcggccgagccggatcctgcgcgtctgccgttgctgcaggggctgcagcaggaaaccgtggcgatcgacgaggcgaaacgcgcctttatccgccagggcgaccgctatctgccgcttgaaggtgaggcggccccggttggcgagccgaagaaggtgtggctgaacaaccggctgcgcattctgatcgccaacgcgttgtcggcgcagcggttggtcagtgcggacgcggcggtgcggctgcaggcggcgaccgcgctgcagcgcgaggcgcagggcgagcagttgccgctgttgacccggcggctggcgcaggagcaagacccgcaggtacgcgacgcgctgagcattgcgctggcgaacctgcaattggccgacgccagcccgcaggtgcgcttcaatgcggtgcggctgctgggggaatcgggcgagccggaaacccgcgcgcggctgcaagccttgaccgacgcggccaatgagccggacgccgcggtgcgcgccgaggcgcagcgcagcctgcagcgcgtgcagcatcgcctgatgatcggcgatctgctcggccaggcgttcagcggcctgtcgctcggttcgatcctgctgctggcggcgcttggtctggcgatcacctacggcctgctcggcgtcatcaatatggcgcacggcgaaatgctgatgctcggcgcctattcggcctatctggttcaggggctgtttcaacagtttgcgccgcagtggctggcgctctatccgttggcggcgctgccggtggcgttcgccatcaccgccgggatcggcatggcgctggaacgcacggtgatccgccacctgtacggccgaccgctggaaaccctgctggccacctggggcatcagtctggtgctgatccagctggtgcgggtgctgttcggcgcgcagaacgtcgaggtcgccaacccggcgtggctgtcgggcggcgtgcagctgttgccgaacctggtgttgccgtggaaccgcatcgcggtgatcgcgttcgtgctgctggtgctggcgttgacctggctgttgctgaacaagacccggctcggcatgaacgtgcgcgcggtgacgcaaaaccgcgcgatggccgcctgctgcggcgtgcccaccgggcgggtggacatgctggccttcgggctgggttccggcatcgccgggctcggcggggtggcgctgtcgcagttgggcaacgtcgggccggagctggggcaaggttacatcatcgattcgttcctggtggtggtgctcggcggcgtcggccaactggcggggacggtggcggcggctttcggcctcggcatcgtcaataagatcctcgaaccgcagatcggcgccgtgttgggcaagatcctgatcctggtgctgatcgttctgtttattcaaaagcgtccgcaggggctgttcgccctcaagggcagggtgattgactgatgagccaaccattgaccgtaaccggcgtgcagaaagcgccccggctggcgttgagcatcggcgcgctggcgttgctggcgctgttggtgatgccgttcttgacgctgttgccggcggatcatccgctggcggtgtccacctataccctgacgctggcgggcaagatcctgtgctacgcggtggtggcggtggcgctcgatctggtgtggggctatgccgggctgctgtcgctcggccacgggctattcttcgcgctcggcggctacgccatgggcatgtacctgatgcggcaggcggcgggcgacgggctgccggcatttatggcgttcctctcctggaatgagctgccgtggttctggagcggcacccagcatttcgcctgggcgctgtgcctgatcgtgctggtgccgggcctgctggccttcctgttcggctacttcgcctttcgctcgaaaatcaaaggggtgtatttctcgatcatgacccaggcgctgacctatgccggcatgctgctgttctttcgcaacgagaccggcttcggcggcaataacggctttaccggtttcaccacgctgctcggctttcccatcaccgccgccggcacgcgggtggcgctgttcctggcgacggtgctgctgctggccgccagcctggccatcggctttgccctggcgcgcagcaagttcggccgggtgctgaccgcggtgcgcgatgcggaaaaccgcctgaccttctgcggctacgatccgaagggcttcaagctgttcgtctggacgctgtcggcggtgctgtgcgggctggccggcgcgctctatgtgccgcaggtcggcatcatcaaccccggcgaaatgtcgccgaccaactcgatcgaggccgccatttgggtagccctcggcgggcgcggcacgctggtggggccgctgctcggcgccggcatcgtcaacggcgccaagagctggttcaccatggccattcccgaatactggcagttcttcctcggcctgatgtttatcgtcgtcacgctgtttctcccgaaaggggtgatcggcctgctgcggcggaggaaaagcttatgaaggcgatgcaagtgaccgacgaactgtttacccatccgctgccggcggacaaataccggcagcaaaccgatccggtgctgcagctcgacaacgtcaacgtcagcttcgacggttttcgcgcgctgaccgatctgtcgttgcgcattggcgtcggcgaactgcgctgcgtgatcggccccaacggcgccggcaagaccacgctgatggatgtgatcaccggcaagacccggccggacagcggcagggtgttttacgatcagaccgtcgatctgacccggctggcgccgatgcagatcgcccacgccggcattggccgcaagtttcaaaaaccgacggtattcgaggcgctgacggtgttcgaaaatctggagatcgcccagaaaacccgcaagtcggtgtgggcctgcctgcgcgctcgcctgagcagcgagcagcgcgaccgcatcgacgagatgctgaagaccctgcggctggggcatgagcgccaccggcccgccgggttgctgtcccacgggcagaaacagtttctcgagatcggcatgctgctggtgcaggaaccgcacctgctgctgctcgacgagccggcggccggcatgaccgacgccgaaaccgactacaccgccgaactgttccgcgagctggcgggcaagcattcgctgatggtggtggagcacgacatggggtttgtggaaaccattgccgatcgcgtgacggtgctgcatcagggacaggtgctggcggaaggatcgctggcgcaggtgcaggccgatgaacgggtgattgaggtatatctggggcgctgaggaggcgtaatcatgctgcaggtagaggaattgaatcagttttacggcggcagccacattttgcgcggcctgtcgttcgaggcgcgcatcggcgaggtgacctgcctgctggggcgcaacggcgtgggcaagaccacgctgctgaaatgcctgatggggctgatcccggcgcgcagcggcagcgtccgttggcagggcgaagccatcaccggtaaaaagccgcatcagcgggtgctggcgggcatcgcctatgtgccgcaggggcgggagattttcccgcgcctgacggtggaggaaaatctgctgatggggctggcgcgcttttccggcgccgacgcgcgcgcggtgccggatccgatctatgacctgtttccggtgctgcggcagatgaaggatcggcgcggcggcgatctctccggcgggcagcaacagcagctggcgatcggccgggcgctggcctgccggccgcagctgttgattctcgacgaaccgacggaagggatccagccttcggtgatcaaggagatcggcgcagtggtcaaacagctggcggcgcgcggcgatatggcgatcctgctggtggagcagttctatgacttcgccgccgatctggcggacagctatctggtgatgtcgcgcggcagcatcgtgcagcgcggcgccggcagcaatatggaacaggacggcgtacgcgcgctggtggcgatttgaacgaaaaaatgggagccgcatgtctgaaagtcgtgccgttgtttttccttgctgatgttatggattaatctaaaagacgttctttattaatcccttgccatggatagctaacatcatcatgaacgaaatcactgtgtcacgcctcggttgcatcgtcctgtctctgtttccggccctgtgggggctgttcagcctgttgaacaatacggcggatttcgccggcaccgcgcgcaatgcggtcgggccgctgcttgccatgcaggatacctatcaaacgccggggctgatgtggcgcgcgatccgcgccgactgggcctgcatgttggggttggcggtcatcaccacgctggaaacgctggccggcctattcgcggccgcgggcgtggtgctgatgatcgggcgattgaaaggcccttacgccgccttcgccaagggcaaagcctgggcgatgctgggagcgctttgcgcgatcgcggtgtggggcgtcggctttatggtggtcgccggcgactggtttatggcctggcaggccaagaaggatccgttggcggtgcaactgggggcgctgatctacctggcgcccaatgcgtttgccttgctgttcctgatgctgcagcgggagccgcgctaaacggcggcggagcggggcgcggttacagcgccttgctcatataccagatgcctatcgagccctgggcgctggtgtagcaggtctcgccacacatgctcaatccctggcgctgataaaaacgttgggcgccggtgttgcgttgcagcacctccagccacagcgtcttctgctggcgctcgatggcccgctgctgcacctgttcgaacaggcgctggccatagccgttgccggcatggcccggcaggaaatagattttctgcagctctgcgccgatttgttcggttggtgccagcaggctgtcgaagttcacccgcgcatagccgaccagggcgtcatcctcataggccaacagccagcacacgtccggctggcgcagcgtctggtccagcgcggagacggaaaaatcctccgccagaaaggcctccagctcgtgcgggtagcgccacagctcaccaaagtgggcgcgataggtgcggatgccgatatcgcgcaccagggttaaatcttccagcaatgcctgacggacggtgaacatgagtgcccctttgagtaagaaaaattacagccgttgttccagatgccggtggggcaccatcgcctgatgcagaatggcaagaacggtgatgccggcagggcggctgcggtaatagatcctatggctggcgtaaggaaaactgcgtatctcttcgcccagatcgtgaaagtgggccttacccgcttccggcatatccgccagatgatgcatgacctctctcaactgctcaagatagcggcgagattgcgcttggccccagtgctcgacggtgaaatggcgaatagccagcagatcttgttgcgcctgcggggtgaggcgaaacgcgggcatctcagtcggtttcatcggtgagcagacggttgaagaaggcatcgccgtctaccgccttaccggcgtcttcctcggcggtagcctgcgcgattttttgctgcagcgcgcgtaatttgagatcttccagcgcctggtagtcttctaccgacatgacgacggcgaccggtttgccgttgcgattgatttgcaccggttcacgctgcgccttgagcagcaaatcgccgaattgggttttggcctcgttcgcggtgagtgcgtacatttaatcgctccagttaattaaatcgttcgattcaatcattatacggcgcgatgaaaaaatcaccaatgttattccggcgggcaggtttcgttggacagatgccgcggcgtttcgcggcgaaagcccaggccgatgatgcggccgaacaggcgaggcagccagcggctgttgccgacgcgggcgatcaggcgtgagccgcccgccgcgcggcgctgacccggcttacgctgactcattttgatctgcaaaaactggatggctcgggtgggaaattcgcgccggcgctgcacgctcagcagatgcttcagctgcagccgatgctggcgcagcggcgggatcagggcgttggcggcggccaccgcgtcctgaatcgccaggttgacgcccacgccgccgatcggcgacatggcgtgcgcggcgtcgccgatgcacagcacgcccggtttggcccagcgatccagacgatcgatgcgaatgctcagcagttttacctgatcccactcgaggatctcctgcaggcgatcgtcctggaatggcgccacctcggcgaggtgcagcaaaaatttctccagcccgctgcggcggatcgcgtcgaagctgcctttgtcgatcgaatagccgcactgccagtagtcgccgcgatcgatcatgatgaagttttgcttcggcccggtgtggcccatcgaccaggccggatcgcccggctgcttgctgagcttcatccacaagacgtcgcgcggggcgccgaaggagcggctgctgagcgccgcctgctcgcgcaccaccgagttgcggccgtcggtgccgatcaccagccggctgcgcacgcggatcgggccctccggcgcgtcggccagcacgccgcatacctggccgcggtcatacagcagcttatgaacctgcgtcgaggtgagcagcctgaaatgggggaaggcggcggcctgctgcgccaaaaagttgagaaactcccactgcggcataaaggcgataaatttgcagcgcgtcggcaggcggctgaaatccgccagtttgatgtcgcggccggcgacttcggcatgcagggattccgcgcgttggtgcggcaacgtcagcagttcgtcgagcaggcccaactgatgcatgacttccagcgtcgacgggtgaatggtgtcaccgcgaaaatcacgcagaaagtcggcgtgcttctccagcaccgtcacgtcgatccccgcccgcgccagcagatagccgagcatcagcccggcggggccgccccccacgatgcagcaggtggtggcgtaaggtgtgatcggtgatgacggcatggtggttgaccccggagagcggcccgcatcccgtgagccgcaagtgaacgtttagtattgataatgattatcaatatcaagtttggctgtcaacccgcggcgcagtgtggtcaaagggggcggacagatggccgacgcggaacagctggccgttttgcggccctacctgcggcggttcacgccataaatccagccgcactaaccgccactcggcggggtcgaacgccacgatggaggccagcgcgccgggcgccgcctgctgttgccgacgcaatgcaggcagatcgctgtaggggatgatggcctgttcctggcaggttgcccaggcggcctcggccagatgagggcgatcgaaatgcgtcagccacggcagccaatgattgacgcgcggccagccgaacgcctggctgaggcctctgaaaccttcgccggccaggaaatcgttcatgccggcgctgctgttccacaggtagaagggagcgtagagattttcggcgctgccttcgctgcgctgcgcgtacagataggctttgacgatcagctgcgggcaggcgtcgagccgatggccgaaatcggcgatgcggcggcggacgatcgccatgtcgtaatcggcgggcagggtgaaacggtattgcatcgcgagcataaggattctccgcaaagacattgaccgggagagcgtgacacgccatctttatcagtaaaatcggtattattttgattgatggttcagaaaatcaggatggtcagcatggggcgaatcacgttcgatctcgaggatttgcgcagcttcgtcaccggcgtcgagctgggcagcttcgccaaggcggcggaacggctggggcgttcgacgtcggcggtcagcgctcacctgaaaaagctggagcagcaggttggcgcgccgatcctgcgcaaggccggacgcggcatggtgatgaccgaggcgggggaaaccctgctcggttacgcgcgccgtctgctggagctcaatgacgaagccgccgccgcggtgcgcgggttggatctgcagggcacggtgcggctggggctgcaggaggatttcggcgagacgtttctgccgcaggtgttgggcagctttgcgcgtgccaatccgaaggtgcgcatcgaggcgcgcatcgcccgcaatgccgaactgatcgactgggtgctgaaaggccagctggatctgtcgctggcgtgggacggcggtttgagcacgccgtttcatcaggcgctggggcagcggcagttgcactggatcgcgtcgcccggcttcgcgctggcgccgtggcgagaaggggatgagccgttgccgttggtgatgttcgacgcaccctgtctgatgcgcagcgcggcgacgcaggcgctggatcgcgccggcattccctggcgcatcgcctttaccagccgcagcctgaacggcgtttgggcggcggtgagcgccgggttgggcgtcacggtgcgcacggcggcgggtttgccgcccggcctgtcaccgttggcgcccgaactgctgcccgttctcggccagctcggcgtggtgctgcaccgcgccgaggatcagccctcggcggccgtgcagcggctggcgcagatcgtggtcgagcggatcgaaacctaatctttggcgatgggctgtttgccgctcagttggccccattcgctccaggcgccgtcatacagcttgacctgcggggcgccgagcgacagcaggccgaacgccagcaccgccgccgtcacgccggagccgcagctggtgatgatcgggccgttgatatccacgcccttgtcgctgaaggtttggcgcagcgcctccagcgatttgaagcggccgttttccagcagctcgccgtacggaatgttgatgctgccgggaatgtggccgcggtgcaggccggggcgcggctccggcgcttcggcataaaagcgcggcgcggcgcgcgcgtcgagaatttgcaccggcgtgcctaacgcctgttccacttgccgcatatccaccaccgcgtcggcgttgaaccgggcgttgaacgcctgcggttcaggctgcgccgggccggtggccagcgcctggccctgcgctgtccagccgttcagcccttcgtccagtacgtaaacatgctgggcgccgaaattgcggaaggtccaccagccgcgcggcgcggagaactggttaccctcatcgtaaatcaccagggtatcgcgctcgctgatgcccagcttgcccaccgccgcgccaaactccgccgccgtcggcagcatgtgcggcagcgcggtgtttttgtccgccacttcgtcgatgtcgaaatagaccgcgccggggatatggccgcgttcgaactcggcaagcatgtcctttttcggcgttagccccaccggcgacatccggacgtcgatcaccaccagattttcatcgttgatatgttgcgcaagccattgaggggtcaccagaaacggagagttcatcgttattgttcgcctgttgtgaaaacggattttcactatacaccaggccgcgcggggatgaagtatgatgttcagtcaaaggcaatgggcagggagcggaaaaatcatgacggacgaggcgtttggcggggccaagatcgcgctgctgtgcgatggtttcctgctggtttaccaacgggacgataaaccgggcattccgtggcccggcctgtgggatctgcccggcggcgggcgggagaacggcgaaacgccgctgcagtgcgtgcagcgggagacgcaggaagagttcggcgtggcgatcgccgaacgtcaggttgtctggcggcggcgctacgacggcattttgcccggctatccgccgacctggttcatggccgggatgatcactccggcgcagatcgccgccatacgtttcggcgacgaggggcagcgttggcggatgatgccggtggagcagtttattcaccatccgcagggtatcgaacacctgcgccgccgggtggcggagtattggcggcagggcggttaaccccgttgttcaggatgccgccagccggttgatctgcgccggttcgatgatgcgcagcgcgctttcccgtcgcgccaccgccagcatcgcccgcccgattcgttcggtgctgcttacccgggcgggaaacagccgcaatgcgccgagccacagcggcttgaacagccgataggccagatcgtagaggcgggttttggagcgaatgccgtgcagcggcacaatggcgccgggacggaacatcaccgcgtggaacggcagcgccagcagcgcgttttcggtggcgcccttgaccctggcccacatgctgcggccgcgttcgctgctgtcggtgccgaggccggagacgtagacgaagatcatcgacggattcagcgtcgccaacgggcgggcggcggccagcgtcagatcgtaagtcaccgcgcgatattcagcttcactcaggccggaggacgaaatccccaggcagaagaagcaggcgtcgtagccggcgagctgcggctccagcgccgacagatcacgcagatcgggcacagaaagctggcgcagtttggcgtggctctgggccaacgggcttcggccgatgctgagcacttcgctgacgcgcggatcgtgcaggcattcccgcagcgcgccctggcccaccatgccgctggcgccgaaaataatcactttcatgctctgttctcccactggccggcggcgcgctgcgtgcgccagcggctgggcgtcagcgtttcccactgaataaaggcgcggctgaacgaattcagctcttcgaatcccagcacaaaggcgatttcgcccggttcaaggtcggtttccgccaacagccggcaggcggtgcggtggcgggttttgtccaacaattgctggtagctgtagccgtgctgttgcaagcggcgctgcagcgtgcgcgggctgagatagagttcagcggccacgctgttgacgctggggcgctggccgcgcatgctgcggctgaggatcgccatcacctgcgtgggcagatcgtgcgccgactgagatttggccagctccgcctccagccccggcagcaatacggccagcatgtcctgattgtaagtgatgaacggttggtctatcagcgcgcggtcaaacaccagcacgtcctgcggggcgttgaatgtcaccgggcagccgaaatagcgcgccagcggcgaggcggcgtccggccgccgggtcaattcgatcgcctgcggctgcaggggcaagccggtgccgcgccgacacagggccgtgatggcggcgaacatggcgtcgatcagcagcgccggcgcaggggcttcgctcatggtccagcgcgtatgcaagcggatgctgtcgccgtcttcttccagcatcagctcttccgggcaaaccagtcgtttatagcgcgccaccttttgcaacgcttcgcccagcgtggcggaatgcagcgcggcgaccaacgcaatgtcatagtgttccggcgccgcctcgccgcccagacgcagaccgaaggcgggatcgtcgttcaactgcggcagactgcgccaaagagagaagaattgttgcgtggtgagtttaatcttgtcgcgccgcgcgccgaacaggccggcaggtagcccggccaatcggccgagctgctcgatatcgacgccctgcgccgccaggtgtaccgccagcgtgccggaaaccgggatttgatcgctgctcaatgcgggctccttagggttttcccgtcacgactgccgcgatggcggcgtgatccggcgagctgtcgtcgtggtctgtgctgagactgagggcgcgaaacgcggcgtcctccgcctggcgttctgccaacacctgcgccgccatatgcaccgcgtcgctgccgagcagcaggcgtagcggaggggcttccagcgccgccaactgcaggatcgcctgcgccgccttggccggatcgccggtttggctgccgttatgctgctgcaggaaggccagcatcggccccagcgtcggctgataggcttcgccgatcggcgcaatggtcattgaagaaccggcccagtcggtgcggaagccgccgggttcgaccatcgtcaccttgacgccgaagggagccatctctttggccaatgattcggagaacccttcgaccgcccacttggcggtatggtaggcgctgaggccggcaatgccgaggcgagcgccgatggtggcgatctggatgatatggccgctgccctgcaggcgtaatatcggcagcgccgcgcgggtgacgttgaacacgccgaagaagttggtttcgagctgcgcgcgaaaatcggcttcatcggcttcctccaccggcgcgatattgccgtagccggcgttgttgaccagcacgtccagccgaccgaagcgttcaatcgccgtgcgcaccgcgcgttcggcggcagcggcgtcggtgacgtcgagcgcgatcgtggcgacccgatcgccgtagcgttccaccagcggctgcagctgttgcggctgacgggcgggggcgaccagacggtgcccggcggccaacaccgcctgcgccagctgttggcccaggccgcgggaactgccggtgattaaccatacctgtgactgagacatcatgaccttcctgattgcgagtgggtgtgatgccactttagagcgccgggcagcgcagcgataatccgatcgcgtcaagatttaatccgattgcgccaaactgtcggccggcatcagccgctggatggtggcgccgaccttctgcactgccatctcgatctctgtcgtcagcgtcggcgcatagttgatgcgcaggcagttgcggtacttgccggcggcggaaaagatgctgccgacggcgatttgtacgccttgctgttcaagatggcggttcagccgcagggtgtcgaacgcctcgtccagttcgatccacagcataaaaccgccgcgcggccggctgacgcgggtgccgtccggaaagtgtttcaggataagatcggtcatgcgatcgcggttctgctggtagcgtgcgcgcatgcgccgcaggtgctgcaggtaatgcccgccgcggataaattcggcgatcgccagctgcggctgggtggcggtggcgccggagccgatgaacttcatgtgcagcacccgttccaggtagcggccgggcgcgatccagcccacgcgcagccccggcgccagcgttttggaaaacgagctgcacagcagcacgcggccgtcgtcgtcgaatgacttgatggtgcgcggccgcgggtagtgataggcgatgtcgccgtagacatcgtcttcgatgatcgccgcgtcgtggcgctgcgccagcgtcagcagccgctgtttgtgggcgtcgggcatgatgtagcccagcggattattgcagttgggcgtcagcaggatggccttgaccggccactgttccagcgccatctccagcgcggccaggctgacgccggtgagcggatcggtggggatttccagcgccttgatgcccagccccttcagcgtctgcatggtgccgtggaagcagggcgaatcgaccgccacgatgtcgccgggttggcaaacggcgcgcagcccggcggagattgcttcctgacaaccggtggtgatcagcagctgatcggggccgatttggcagccggagtccagcagcagacgggcgacctgttcgcgcagcgcggccacgccctgaatgctgtcgtaatacagactgcgcaggtcgccgtggcgggcggcgttgcgcagggcgacgatcagcggtttcatcgtcggttcggcgatatccggcatgccgcgccccagctggatcaggccttcgcgcggccggctgcgcaccagttccagcacctgctcccattgcgaaatgtccaccggccgctgcaccggcgccgtcatggcgggcagctcggcctgcgcgcgctgcatatgcacgaagtagcccgacttcggccgcgcttccaccaggcgctgttcctcgagcaaccggtaggcttgctgcaccgtgctgatgctgacgccgtgctcctggctcaacgcgcgcaccgaaggcaggcgatggccggccggatacaacccttgctgaatgcgttggctgagaatggcggccagcgtggcgtagcgtgtcatacagaggcctctcatcggtggtcaggattaaaaaaccggtacagatacgttcaaaataaaccattcagcgggttttttggcgcagctgtatgaaaaaaatagcgccagcgtgaatctgtattgttttttgcctggcgcgcatcatcactaccaggcgaaaacatcaggggggataataagatggctctgtttgatggcatgacgatgtggcgacgggtaggctggtcacgctggcgttggtatttgttgcgtcgcagaacgcgcagagagttactgctgctgaacgacaggcagctggcggatatcggcctgacgcgggcggaggcctggagggaagggtataaaccgttctggagagaataaggaaagtcaatgctgaaattattgggtaaagcctcatcgatcaacgtgcgcaaggtgttatggacctgtcaggagttggggctgacgctggaacgggaggactggggcagcggttatcgctccacgcaggagccggcgtttttggcgctgaatcccaacggcctggtgccggtgctgatcgacggcgagcgggtgctgtgggagtcgaataccatttgccgctatctggcggggcgggaagggcggcaagatctgctgccgcaggcacccggcgcgcgcgcggcggtggagatgtggatggactggcaggccaccgatctgaacggcgcctggcgctacgtgtttatgtcgcgggtgcgtgggcatgcggattatcaggatgccgccagcctggcagccgccgagcgcgaatggaaccggctgatgggcttgttggacgcacatctggcgcagcacggcccttatgccgccggcgccgccttcacgctggcggacgtggtgctggggctgtcgctgaaccgttggctgatgacgccgttcgagcggccgcattatgcggcgctggcggcctatcagcagcgcctgctgcaacgccctggctacgtgcagcacggtgctaacggtttaccgtgatatgaaataaacggttcatttcatcttgtccggatacgccccgccgtgtccggactttcctcattacatcatcccgtcaacgtttcatgaacggcatcacgaatatgaactttattttcctgtgtgcttgttattgaaatttatattccatataaacccgttatcaaccggcgcgtttcattgagcgacgcctggttctacgcagagttttggtcacgggagaaaatgatgaaacaggtacgcgttgggttaatcggcaccggttatatcgggcgttgtcacgctatcgcctatgcgcaggccgccacggtctttcctctgaaaggggacctggtgctggagatgctggcggaagtgacgcccgagctggcggcgcagcgcgccgccgaattcggctttgcgcgctcgaccggcgactggcggcagctggtggccgatccggcgatcgatgtggtggacatctgcgcccccaactttttgcacaaagagatggcgctggcggcgatccgccacggcaagcacgtgtattcggaaaagccgctggcgctggacgccgccgacgcggcggagatggtgcaggccgcgcgcgctaagggggtgaaaacgctggtcggttttaactacatgaaaaaccccaccagccaactggcgcgcgaaattatcgccaacggcgaaatcggcgaggtggtgcatttttacggtacccacaatgaggattatctggccgatccgcgcacgccgatcgactggcactgtcgccgcgccagcgccgggttaggcgcgctcggggatctggcggcgcacatcgtcaatatggcgcactacctggtgggcgatatcgtggcggtttccggcgatatgcagaccgtgatcaaacagcgcccggatccgcaagacccgacgcgcctgcacccggtggaaaacgaagatcaggccagtgcgttgctgcgtttcgccggcggcgcgatgggcactatcgaaacgtcgcgcattgcctgcgggcgcaagatggggttgacctatgtggttaccggcaccaaaggcacgctgagttatacccaggaacggatggcggagctgaagctgtatcggcacgatgaaccggcggagcggcaggggttcaagacgttgctggtggggccgaagcacccggactatgcggcgttttgcatcagcgccgggcacggcattggttttaacgatcagaagacggtggagatccgcgatctggtcaacggcatcgccgcgggcgatcgcatgtggccggactttgaagagggctggaaggtgtcgtgcgtgctggacgcgatagccgcctccgccgaacagcggcgctggctggagatcaaccgcgattgaaaatgaaatggcgctctcccgtggacagcgccattaatttattacgttgccagctaaatagcttattaagttaactttataataagttattggcttgataacttagaacgagaaacacgaacagccgaacgcgccccagaaggcattctcgtccgacaccgggatgctggagcggcgcgcgatgtcatgctggtgtgcatgcacgccgcacgggccgcagcattgatgcgcctggctcactaccccgacgcgggccgccgccgacggcggtgcggagcggtaatggcccggcacctgggtgaccggcgaccactccggcagcaccggcagcggcggcggcgccagcggtgagaagctgccggcggcgtagaccactttgccgtccaccaccgtcataaccgactcgatgcctttgatctgctcttccggcacgctgaaatagtcctgcgacagcaccgccaaatccgccagctggccgaccttgatctggcctttcttgccctgctcggtggagaaccaggcgctgccctgcgtccacagcatcagcgccgtttcgcgatccagccgcgcgctgtcgtcgtacatcgccatgccgccgacggtgcggccggaaaccagccagtacagcgccgtccacgggttgtagctggcgacgcgggtggcgtcggtgcccagcccgaccggcagctcggccgccagcattttcgccaccggcggcgtatgtttggtggcttcgatgccgtaacggtcggcgaaatactccccctggaatgccatgcggtgctggactgcaatgccgccgcccagtgccttgacgcgctcgatattgcgctcggtaatggtttcggcgtggtcgaacagccagtgcaggccgttgaacggaatatcgcggttcaccttctcgaacacgtccagcatgcggctgatggattcgtcataggtggcgtgcaggcggaacggccagcggtgctcgaccagatggcgaaccactcgctccagttcgtcttcggtgcccggcggcagatccgggcgcggctgcaggaagtcttcgaagtcggcggcggaaaacaccagcatctcgccggcgccgttgtggcgatagaagtcggtgccctggcccggtttgagcatatcggtccacagctcgaagtcttccagctcctgtttaggccgctgggtgaacaggttataggcgatgcggatggtcagctgctttttctcgtgcagctcggcgatcacctgataatcttccgggtagttctggaagccgccgccggcgtcgatggcgctggtgaggccgaggcggttcagctcacgcatgaactggcgggtggagttgacctgctgctccagcggcagcttcggccctttcgccagcgtggcgtacaggatcatggcgttgggtttggcgatcagcataccggtcgggttgccgttggcgtcgcgctggatctcgccgcccggcgggttcggcgtgtctttggtgtagccgaccaccttcaacgccgcgcggttgagcagcgcgcgatcgtagagatgcagaataaataccggcgtgtccggcgccgcctggttgatttcgtccagcgtcggcatgcggcgctcggcgaactggaattcggtccagccgccgaccacccgcacccattgcgggctcggggtgcgcagcgcctgttctttcaacatgcgcagcgcgtcggccagcgagggcacgccttcccagcgcagctccaggttatagttcaggccgccgcggatcaggtgcaggtgcgagtcgttcaggccaggaatggcggtgtggccgtgcagatcgatcacctgggtttccggcccggcgtgctgcatgacttcgctttcgctgccgaccgccagaaacttgccgtcgcggatggcgaccgcttgcgcggtggggtgttggcgatcgacggtgtgaaacttgccgttggtgatgatcaatgaagcgtggtggttcataacattctcccggcgaaccgcctaacggcgggtcagccattgatgaaaaacgcgagtcacgataggcatccacaggtacaccaccagggcgaccacggtggcgtcattgagaaaatggccgagcagcgagccgtccagctgcggcagcacccgtccccaaaaccagggcaccagattggtggatggaaagatcaccagtagggtaatgatgaattgcttccactggggcggctggcgcacgctggggttgggcggggtaaaccagaactctgcgccggggcggatctcgatatggtcgttctccagcaacagcggagtgacttcttcgatgtattgcttgcgctgcggcgagttgagccagcggtagagattgtcgagattgtcgaagcggaccagcaccgtataggcctgttcgtcgccggaagggcgaatcacgttgacgcctaaatggccggtgaagcctgcggcgtcgggcatgatgcggttcagccaggcctcataggcctgttcgttccccggcgccaaacggtgggtgatcaccagcgtgacatgctgcggatgggccataaaaccgactcctgaaaataccccggcgcgaggccggggcaaggggaattatttcaccgtgcgggccggtgcgtggtgcaccatggtgtaagcgtagtcgacgcccatgccgtacgcgccgctgtgttcgcgcaccagcgccatcaccgcgtcgtaggtatctttgcgcgcccagtcgcgttggtactccagcagcacctgctgccaggtcaccggtacggcgccggcctgcaccatgcggtcgatcgaacgttcgtgcgcatcgacggaggtgccgccggaggtgtcggtcaccacatacacttcatagccggcttccagcgccatcagcgccgggaaagtcaggcacacctcggtccacagcgcggagatcaccagctttttacggccggtggcttccacggctttaacgaaggccgcgtcttcccaggagttcatcgaggtgcgttcaatcggggtgatttcagggtgtaccgccagcagttccggccagatatagccgctgaagctttcggtttcgaccgaggtgaaaagggtgggaacgttgaaaatcttgcctgccttcgccaaaccaacaacgttgtttttcagttgctgacgatcaatattagccacgccgaaggccatttgtggttgatgatcgataaaaatcagtgcggaattgtctttatcaagcagttgaaacttggacataatttaccttcccagtgatatttcggttgaacatctgatgagtgtaacgccgataaaacccatggtaggcagagggcgatttcaaagataccgcagaatttttgccgacttgttgagtttttttatacacgggagaaagcatgagattaaacctggaagcgctgctgattttggacgcgctggaccggcacggatctttcgccgccgcggccgccgcactgtttaaaaccccttcggcactgagctatatggtgcaaaagctggagaacgatctcgacatcaccctgctcgatcgctccgggcatcgggcgaagttcaccgataccggcaagttgatgctggaaaaggggcgggtgctgctgcgggcggcgcaggatctggagcagcaggcgcgctatgtcgaaaacggctgggaaagcgaaatcacgctcgggattgacgcctctttcccgtttgcccgcctgttgccgctgatcgacgagttctatcggcagcatcaccatacccggctgcgtttcagccacgaagtgctggccggctcctgggagtcgctggtctacggttgcgccgacattatcatcggcgccatctgcgagccgccgtcacgggtgggctatgcgttcagcaggctggggcagctggattacgtgttcgccgtcgcgccgcagcatccgctggcggcattgccggaacccttgccgaaggacgaaatccgtcagcaccgggcggtggtggtgcgcgacacttcgcgcgtcaacgcgccgcagagcctgaatctgctggaagagcaggatacgctgacggtcttcggtttcgacgccaagctgcaggcgcagctggccgggctgggctgcggctatctgccgcgttctttggcggaaccttacctgaacagcggcgaactggtggcgaaacgcgttgaatcggaacgctgcagcgacatcgcctatttcggttggcgggaaagcgccagcggcctggcggccaaatggtggcgcgaacggctgcagcgctacgcggacgacggcgaggcctacccggcggcgcagtgagggccgctcgataaggataaatcccccaataaggacatcgggaatgaaaaagacactaagcctgttggcgttgttgctgctgagcggctgcggcgccgggcgtgaggccggcataccgttgccgcaggccccggcactggccgcaacgcagctcagttacccggagcgggtgcataacgcggtgagccgtgagctgcgcttgccggaacatgcgcacggtcagcgttgcacccttgctatccgtttgcagccggacggcaagctggcgagcagcaagatcgtaagaggcgatgcgcccctgtgcgcagcggcgcgcgctgcggtgcagcgcgcgcagtttccgccgatggccagcgctaccgaatacgcgctgttcaacgccgtggtgctcgatttcgttccctgaagggatatgaccgacgggccgtctgcgcggccaatgcttgtcagttagcgtttttttgaagtactcgtgacgttttcggtcgataaatgagaggtgcatcatgaggctcctgcacctcgaccgagccaggggccgaaaggcgcggcccctggcaacccgcgcctttgccctatcagacggttggctttgccaacgttactcagcccatccctgggcctcgccccttcggggccgctgcaagcagcgttcaaatctgctccaggcagatttgtcctcgctccgccataccgcattgaggccggttgcgacaggcgtccctgcctgtctcacctgaaaccgccgtccatggcggtttcgcctaatgcgctatgcctgcgttcggcgtcttcaagggcgtccaataccgtgctcatctccgattcgtcttctttgcgatatatgggttgcccggtagctgccagctcgggtgttgacctttggcgcgcatcaccggctgccggcaagacagcgttgtcaggggcaaccggccagggaaggccggttgaggcgagactaacagggacgtttgtcgtagccgacccgcccgacaatgcagacgcggcgagggcatccgcacagcggacagacggtgttaagcgaaggcgcgggtggaggggccgcgccttcggcccctccaattgccgttcattgtagtaacacagaaatgcggaacatttacggcaattcaggctacacaaaacacacaaagatgggataaaaaatgccagtcaggtttaactgactgatattaccgcctgcgcggcccgttttttcgctttgccgcgtacgcaacccgctgaattttcacttagctttgccattttcgttattttgaacgtcactgcggctcaccgatactgggggaaaatccccaaccgcgagccgcagcatgtcccacgcccactatttgcaccctgaacaacgcgaccggatccggcggcttcatcggcgctggcactggcggctggagttgcccacctgggggatcatggcggcggtgtacggcggctggtttggcgtggcgcattattggcaggcgctgggcccgtggcttggcgcgccgctgctgatcctgctgaccaccgggtatatgtcgctgcaacacgagctgatccacagccatccgacgcgctggccgcgcgtcaatcagctgttcggcttgttgccgctggcggtgtggtatccctacgggctgtatcgggattcgcatctgcgccaccaccgcaacgaccacctgaccgatccgcatgaagatcccgaaagttactacttcagcgccgcgcagtggcggcgttatccccgcctgctgccgcggctggccgcggtgcgcaatacgctgatcggccgggtgctcctcggcccggcgctggatatcgtcaccacgctgttcggcgcagtgaagacgcttgcagcgggcgatctgcgcgcctgggcgatgtggctggcgcatctgtcgctgttggcggcgctgctgcactggctgcagatgcagggcatcggcgcggcgttttacctgttggccatcagctacccggcgctggcgctgaccaaggtaagatcgttttttgagcatcgcgccgtggacgcaccgcaggcacgttctattattaatgaggcgggctggccgtggcggctgctgtttctcaatctgaactaccatttagtgcatcacgatttgcccggattgccctggtatggcctgcgcgaagtctatctggcggaacgcgaggcgtatcagcgccgcagccagggatttgtcgcgcagggttatggtgagtggctgcgcgattacgcgctgacgccgatcgacgtcggcgtgcatccgctgagcgccggcgagcggcgggaggaacgcggtgcccggccgaagaaaaaacttattgcgcgctggaagcgcgtttctcaggattttccaaccgaactggcccatgagccagaaaacatataaccagaggaaaagtatggcaatcaccttatcacgcggacgttcctttgccgtcgcgctggctctgctggccgtcggcggtctggcacaggcggccgactcggtgcgcgtcggctccaagatcgataccgaaggttcgctgctcggcaacatcatcgtgcaggtgctggaagccaacggcatcaaaaccaccaacaagctgcagctcggcaccaccaaggtgctgcgtggcgccatcacttccggcgagatcgacatctacccggaatacaccggcaacggcgcgtttttcttctccgatgagaaagacccggcgtggaagaacgcccaggccggcttcgagaaggtgaagcagctcgactacgacaaaaacaaaatcgtctggctcgatgcggcgccggccaacaacacctggaccatcgccattcgtcaggacgtggcggacgccaaccatctcaaaacgctggcggatctcggcaagtggatcaacggcggcggcaagttcaagctggcggcctcggcggaatttatcgagcggccggatgcgctgccggcgttccagaatgcctacggcttcaagctgaatcaggatcagctgctgtccctggctggcggcgatacggcggtgaccatcaaggcggcggcggagcagacctccggcgtcaacgcggcgatggcctacggcaccgatggcccggtggcggcgctggggctgcagacgctggcggatccgaaaggcgtacagccgatctacgcgccggcgccgatcgtgcgcgaagcggcgctgaagacgcacgccaatctgcctgagctgctgaagccggtgttcgcctcgctggacgggccgacgctgcaaaaactcaacgcgcagatcgctgtggaaggccaggacgccaaacaggtggcggccgcttacctgaaagagaaagggtttgttaagggataatgccgaggtgccccctttgccgtcgggagagggggtaaaccgagggagccggagcgtttctttgactatcgccgtaaaacatcgcgtcttgttgacgctgttcatgctgttgctgctggccgcgttcggcctgccgttcctcagttatgcccccaatcgcctgttgtcgggcaaaagcctctccttgttctccctgctgcacggcccggcgctgtggctgctgttgccgctggcggcattggcgatcctcagcctgttgccgccgacgcgggggcgggcgctgctggcggcgttggccgcctgcggggtgctgacgctggcgttctggatcagcgggcaggccgccgggcgtctggcgcaggagggatcgcgcctggcacgcacttcctggggcagcggctgctggttgacgatggcgctgagcctgctgatcgccgccgacgccatggcgcgtctcaccgcgtcgcacctgcggcggatgctcggcaacgcgctggtgctggtgccgccggcgctgctgctgttcggccatcagctcgatcagctgtcgctgctgaaggagtaccataatcggcaggaggtgtttgacgccgcgctgttgcagcacctgaccattctgctggcgacgatggcgccggcgctggcgatcggtgtgccgctcggggtgctgtgttttcgttccgagcgctggcagcggccgatcttctccgtgttgaacattatccagaccgtgccgtcgatcgcgctgttcggcctgctgatcgcgccgctggcggggttggcggtggcggtgccctggctggcggaacacggcgtcagcggtatcggcatggcgccggcgatcgtggcgctggtgctgtacgcgctgttgccgctggtgcgcagcgtggtggcggggctgcaaagcgtgccggccggcgtgattgagtccgccaccggcatggggctgacgcgcgggcagatcttcctgcgcgtgcagctgccgttggcgctgccgctgttcctgaccggcgtgcgcattctggcggtgcagaccgtcggcatggcggtggtggcggcgctgatcggcgccggcggttttggcgccatcgtatttcaggggctgctcagcagcgcgctggatctggttctgctgggggtgatcccggtggtcatgatggcggtcatcgtcgattcgctgtttaaattttgggtttcaatcctggacgtatcgcgccgatgattcactttgagcaagtcagcaaaatttttcagggcaagccggcggtggacgatctcacgctgcacatcgccgagggcgaattcaccgtgttgatcggcacctcgggttccggtaagtccacgacgttaaaaatgatcaatcgcctgatcgaacacgatcggggcaagattctctttgccggcgaagagatccagtcgttcaaaccgcaggatctgcggcggcgcatgggctatgcgatccaatcgatcggcctgtttccgcactggacggtggaggagaacatcgccaccgtgccgcagctgctgaaatggccgcgcgcgcgcattcgcgatcgggtgaccgaactgttggagctgctgcatctggagccggctctgtttcgccgccgctatccgcaccaactgtccggcgggcagcagcagcgggtgggggtggcgcgcgcactggctgccgatcccgaggtgttgctgatggacgaaccgttcggcgcgctggatccggtcacccgcgcggcgctgcaggcggagatcgcgcgcatccatcagctctccggccgcactatcgtgctggtgacgcacgacatcgacgaagcgctgggcctggcggatcgtctggtgctgctcgatcaggggcgggtggtgcagcagggcacgccgctgacgctgttgaccgccccggccaacgatttcgtgcgtgatttcttcgggcgcagcgatcgcggcatcaagctgctgtcgctggggacggtggcggagcgggtgcggcccggtgtcgccgggggcgagccgatcgccgccgccatgagcctgcgcgaggcgctgtcggtgttcgtggcgcgcggcagcgactgcctgccggtggtggatgaacggggcgaagcgttgggggtgttgcacttcaacgatctgatcgccgggcaggcgctgtcatgagcgggcgcatcgggcgcctgctgcgcgatcctttgccctggacgctggcgctgctgttggcgctggtgttcggcatggatcatctgcgcggcctgttcgccgcctggttccccgatctggagcggcccatttatcagcaggacagctttatcgcgctggtgggggcgcacctgtcgctggtggcgatctccagcctgattgcggtggctctcggcgtggcggcgggcgtcgccgtgacccgacgcggcggccgggagtttcgttcgctgctggaaacggtggtggcggtggggcagaccttcccgccggtggcggtgttggcggtggcggtgccggtgatgggcttcagcgagcagccggcgatcatcgcgctggtgttgtatggcttgctgccgatcctgcagggcacgctggcgggcatcgaatcggtgccgcccgccacgcgcgagatcgcccgcggcgtggggatgagcgcctggcaaattctgtggcgggttgaactgccgctggcggcgccggtgatcgtcgccgggatccgcacctcggtgatcatcaacatcggcacggcggccatcgcttccaccgtcggcaccaagacgctcggctcgccgatcatcatcggcctgagcgggtttaacaccgcctatgtgatccagggcgcggcggttgtggcgttgttggctattatcaccgatatgctgttcgaacgttgggtgcgttatctcaccgcctggcgtcagcagacgctggcgaccactccggcggggtaagggggaaatgatgcaggtgtctctaccgatgtacggcgttggccgggagcaggccgaatccttctggcaggtgttgcgcgacaagctgctgcggctggggttgccggcggcgccggaacggctcagctggccggacgatctggcgcagcactggcgacgcgaggatctcttgctcagccaaacctgcggttatccgttggtcagcagtctgccgcagatacagttgatcggcacctatcattatcgggtggaagggtgcgacgggccgaattaccgcagctggctggtggtgcgcgcggacgaccccggcgagcggctggcggattttcgcggccgaacggcggcgtataacagcaccgattcccagtccggctacaacggcctgcgcgcgctgatcgcgccgctggcgcaggacgggaaattcttcggtgcggctatcgcctccggcgcgcattatcagtcgctgcagctgatccgcagcgggcaggcggatatcgccgccatcgattcgatcagcatggaactgctgcgccgcgcgcaaccgcaggcgctggaggggctaaaaatcatcggccgcacggcggcggtgccgggcctgccgttgatcaccgcagccggcacgccgccggaacaggtggaaatcctgcgcgccggcgcccgagcgatgctggatgaggcggtcagcgaccgcctgctgatcggcgatttcagcctggtgccgcgttcggcctaccagattatcaccgtgctggaacagcaggccgccgcgcagggcgtgacggcgctctagccgccgttacagcaggccgccgccgtcgatgtcgatcacgctgccggtgacgaagccattctccatcgccagcagataacccgccgcgacgtcggccgcctgcccgaccctgccgaccggcaggctgacgccaacccgttcgaacagcgcctgacgctgtgcggcgctcatgccgtcgtaggcttcggtggcggtgatgccggggctgaccacgttcacccgccgcggcgccagctccttcgccagctgtttgccgatcgcttccagcgcggcgttgatggcggttttgaccaactgaccgttgaggtatttacgcgacagctggccggaggtcagggtgatcgagccctgtggcgccagcgtcggcagcgccgcctgcaccgcgcgcaaacttccccagaatttgacgttgaagtcggcctgcgcctgttcaagggcggtctccgccagcggcttcgcgtccaccaacggcccggcggtgatcaccaaatggtcgaaagcgccgacggcggcgaacagcgcgcgcagcgacgcgtcatcggtcagatcggcctgcatcaggcgcagcgcgtcgttcttctccccggcgtgagggagacgacgcgaagccagcaccacttcagcgccacgcgccgccgccgcgtaggccaccgcggcgccaatgccgctggtgccgcccaggatcaccagcttttgtcgtttcaggggggagtcgggaatcgtcatgttaaggcctctttttaggtaagtttcaacgggatctatctttcctgattgaaaatgaggaaaaaagtccgcctaatagcaaacacttgtaaattaatattaataattgattgggctaaaaagagagggagcagatgacctcatttgtcgatctcgaggtgtttgtccgcacggtggacggcggcagtttttccgccgcggcgcgcgcgctggatatcacgccggcggcggccagcattgcggtgaaaaggctggagcagcagttgggcgcgcggctgctggtgcgttccacccgcagcctgaggttaacggaggagggcgcccgctatctcgacagcgcgcgcctggcgctgggggcgttggccgaaggagagcaggcgatccgcgagaagcatcaggggctgtccggggtgctgcagatttccgcgccgtcggattttggccgcaatctgctgctcggctggctggacgagtttcggcaacagcatccccacattcagctgcagcttctgatcaacgatcggcaggcggatctgttccgcgaaccggtggatgtggcgttgcgtttcgggccgctggccgactcttcgctggtggcgctgccgatcctgccgcagcatcggcggctgatctgcgccagcccggattatctgcggcggcatggcgcgccgcaaacgccggccgatctggttcggcacagcattctggtgtatcagcccagcggcaaacggcaggtggaatggcggctgtggcgcggggaggagctggtcgagctgccgctgaacggcagctattttaccgatgacggtgaggtggcgcggcgctgggcgctggccgggcacggcgtggtccgcaagtcggcgatcgacgtggcggcggatattcgcgccgggcggttggtgcagctgttgccggaatggcgcagcgacgcggtgccgatcaatctggtctgcccgcatcgttcgcaggtgtcggagcgcgtcaggcaactgcagcgctttttacagcagcgctgccagcgctggatggacgatcacttggcctgaagagtttcggtttgcgccggcgtagcggcggtatccccggcaggcgcgctttcttcgtgcggggtggtggaacgggtgtagatgttcagcccggcgaggaatacgccgcccagagaaccgaaggcgcacagggcgatgacgatgacgaacgcttttttcagcataggaataatttcgcaggttgcttggaacagcgggaattatagccccttcgccgggtgaaacaagaatcgtttttaacggcggcccgcagaccgccctttgtgatcaccgccgttcgcagtcgatggcctgcacgttggccgggcgggcgaacaggtattttcccagcgtcaccagcaccaccgccgccacgatgatcaccagcgccagccactcgcgcggcgccagcgattcgccggcaaaaccgatgccgagcagcaccgccaccaccggattgacgtaggcgtaactggtggcgaccgccgggcgcacgttcttcaacaagaacatataggcgctgatcgccagcatcgaaccgaagacgatcagatagcccagcgccagaaagccgccggtgctcggcatctgagtgaggcgctcgccgctcagctggctggctgccaataacaccacgccggcgaccagcatctccgccgcgccggccatcggcccggccggcagcgagatgcgcgatcccaacaccgatccgaaggcccagctggccgaagccagcaaaatcagcagcgcgccggtcgggttgcccaccaggttgttgccggtgttgagcagcacgatgcccaccaacccgagcgcgatgccggcccattccagtttggtgttgcgcatgccccacagcaggctgaagcagagggtgaacagcggcaccgtcgccaccatcaccgcggcaatgccggagggcacatgttggtgttccgccaccgtcaccaggccgttgcccaccgccagcagcagaatgccgatggcgccggcggccagccactgcttcagcgtcggcagggcgtggccgcgccaggccaggaaactgaacagcacgataccggctgtcagaaagcgaatgccggccatcattagcggcggccactgcgcgacgccgaggcgaatgacgaaataggtggaaccccaaacgatatataacgtgaacaacgccccgatcaacggcaggacgctacggctttgttggctaagcataggattgtattttgcgggaatgattattattagaacgctcagtaaacccgatcgggcaaccgataagcaatggccttcggcattatttttccggcggctgaaagccgttcaatggccttgctgtttccactgcaaccagctgacggccggcaggtaaatcgaccagccgacggccagcagcagcagcatgaactcgggcggcacgccgggcaacaaggcgtccagcttccaggacacggcgtaggcgaaggggccgacggcggcgcccaacaccgccagcggccagggggccgctctgaccacgtccagcaaccaataccaccagcagccgaagccgatccacagcgcgatggtccagagcggcaggccgtgttgcccgctgtagtgcagcacgccgctgtagctccacagcccatccatgccgataccgcccagggcggccagggccgcgcctttgcggcgggcggcaggggtaaagatcagcgccagcgccgcgccggccagcagtatgccgttgagccgatcgcgagtcagcagcgccagcagccagcaaacgcccagtcccagcgtcgccagccagaatccggcatgcggcttcttcatcgttcaactcccgtggggttactctgccgctgcgccaagcgccgacggatttgccagagcgggcgcgaggcccgctgtttgcctgaatgttcgttagttcaaccttagaagggaaggtgcggggtgcacaagcagaataatctgtaccggttgaaaacgtgggcaaaaaccggtgttacaggcgggaaatccggtaggcgcagcggcgcgagccggccagaatgtgttcggcgcgctccacctgcgcctgcagcacttcggtgaagatgcttaattccgcccggcagaagccctggcagacggtggcggcggcgcagatcgggcagtggttttccaccagcagataggaaccgtcctcctcctggcgccattcggccatatacccttcgcggcagcggatctcggtcaggcgcgccacgcgttcgcgcagctcggtggcgccgatcatcgcctgcttgtagttgatgcggttttcctgctcgcgggtctcgatcagcacgtcgatcgcttgttcgcccaacttgtcgcgcacggtgcgcagcagctgcaccgtcagatccgcatgggtatcgggaaagcgcgcgttcccggcagaggtcaaatgccacagctgcaccgggcggcccacgccgcgcgtttccgccaccgcttcgaccaacccctctttcgccagcttgacgaactgctggcgggccgcctcaccggtggtgccgagcacctttcctgcgtcagaagctagctgcgggccgcgggttttcaataacgtcagcaagcggtcactgaccgattgtgcggtgctgccgctattttccaagtttattcttgacatatttctccgcctcgccctaacttattccaagataactcttgttaaatttaacgcaatcttatgaccaactcaatgccattcctctgaaaacaggacgacaaccgtgataacccatgacgacagccgctggagcgaccttttctccggcaaaaatgcggccagtgcgatcgcgctttcgctcggcgtggcgctgcatgccatcaatattctggtcgccaccaccattctgccctcggtggtgcaggatatcggcgggctggatctctatgcctggaacactacgctgttcgtggtggcgtcgatcctcggctccgcgttgtctgcccgcttgctcagcggttacggcgcgcgtagcgcctatctggtggcttcgctgttctttatcgtcggggcggcgctgtgcgcgctggcgccgagcatgccggtgatgctgatcggccgcacggtgcagggcttcggcggcgggctgatctttgcgctctcctacgcgatgatcaacctggtgttcgagcagcgattgtggccgcgcgccatggcgcttatctcggcgatgtggggcatcgccaccctggtggggccggcagtgggcggcatttttgccgagctgcacgcctggcgttgggccttcggcattctgctgccgatcatggcgctgtacgctgcgtttaccttcctgatcctgcccaaaggcaaggcgcagcaggcggccgcgccgttgccgactgcgcaactgctgttgctgaccgtggcggtgctggtggtgtccgccggcagcctggcgcacagcgtctggatcaatctggcgggcatcgcgctttcgctggtgctgatggcctggctgatgaagcgcgaggcgcacgcacgcgcgcgcctgttgccgcatggctcgctgcggcgcggctcatcgctggcggcgctctatattacggtctcgttgctggtgatcggcatgaccagcgaaatcttcgtgccctatttcctgcagctgttgcacggccagtcgccactgatctccggctatatcgccgccaccatggccgccggttggacgttgtccgaaatccttagctccggctggcgcggggcgggcattcgtcgggcgatcgtcagcgggccgctgttcgtgctggtgggcctgctggcgctggcgatcctgatgccgacgccctccggcggtgactggcaggcgctgaccccgatcgttatcgcattgtcgctggtagggttcggcatcggcttcggttggccgcatctgctgacgcgcattttgcaggtggcgcctgaagcggacaaagatatcgccggcgcttcaattaccacggtgcagctgttcgccaccgcattcggcgcggcgctggccgggatgatcgccaatctggcggggctgaacgatccgggcggcgcggcgggcgcggcatcggcggcgcgttggctgttcctggcgttcgcgctggcgccgctgctggcggtattcagcgcctggcgctgcgccgcgatcgcgccgccgggcgcagagacgggcaattttgtacaaactccgccctcgcgcgagtgctagaacgcttctcctcattcggcgatgtttgcggtgatcctggcgttcttcctgcgcgatattttttaaaatccgcttgctatatctctaatttgagattatttctcttatatgggattttcaagcggagtgtgagcggtggataacggtttggagactgccgacctgaggttggcgcagcggctggcggatttgcgccagcagcgggcgtggtcgctggaggaattggcgcagcgcaccggtcttagccgggcgacgctctcgcgggtggagcgcgccgagaccagcccgacggcgtcgttgctgaaccggctgtgcgccgcttacgggttgaccatgtcgcgcctgttgagcgaaatcgaagacgagccgccggagctgctgcggccgcagcagcaaccggtgtgggtcgatcgcgccagcggttttcaccgtcgctccgtttccccgcccgccgcgctgtataaggccgagtttatcgaagcccggcttgatgccggcgcgcagatcgattacgacctgccgtcgattccggcgctggaacatcacctctggttgctgtccgggcagttggaattgaccctggaagggcgcgttttccggctgtcggccggcgactgcctgcgctaccgcctgttcggcgcctcccgtttccatgtccccggcgatgagccggctcattacacgctcgttatctgtaggccatagccatgattgaattgcaacagtgggatgccgctgcggcgcaaagcgccattgccgacttggccgagatgctgcacgccagcgtggcgcacggcgccagcatcggttttgtcatgccctttacgcaggaacaggcgcaggcattttggcagggggtgctgccggctctggcgcggggagagcgtgcgatgctggtggcgctcgcgaacggccgaccggtcggcaccgtgcaactgctgctggcgatgccggacaacggccgccaccgcgcggaagtggtcaagctgatggtgcacccgcaggcgcggcggcagggcgttgcccggctgttgatgcaggaagtgcaggcgctggcggcgcgtcatcgccgcagcctgttggtgctggacaccctgagcggcagcgcggcgcaggggctgtaccgccaattggggttcgaggcggcgggcgacatcccgcaatacgcccgcgccagcgacggcggggcgttggaggccacctgctatatgtacaaactgctgtgaggcttagcgcccgcgccaggccttgagcgcctgttggcgcacctgcagcttctgttgcggcgtcagcttgttgtagtcgcgagccaggccgctctcccaatcgccgtacagtgggttgggcagcacgatgaattcggtgccgaatttgttctggttctcgctgacaaacgctcggcgctgcgcattatcctggtggtaggtcgcggcgccgaagtcgttcaggttgtcgcccgcgtacaccacgatgtcatagccggcttgtttgatggcgtcgaagcgcgcctgcttattggacgtgtcggtactgagcaagacggttttttccgacatgccggtgaaaccgagcttctgcatgttggccaccgtggcggcatattcgctctgtttgcggttcgagacgtagaacatcgtcccctggtgggcgttaacgtaacgggcgaacgacactgcccccggcaccgcgccggcctgttcggcctgcgtccattgggcccaggtggcgccgtcatacggctggccctgctgcgcctgccaggcggagtaggcgctgttgtccagcatggtttcatccagatcgaccaccaccgcctttttgcggcccggcgcggccttggcccgatcgaaggcgcgttgcgcgctgttgaacgcttggtgggccagcgcctggtattcgccggactgttggaaccagttcaccgccagcaccgactgatccgccagccgctgctgggcctgggcgtcggtgtgcggcggctgcgcgcaactggccaacgtcagcagcgcgacgccaaccgccgcgccgagggtgagtttccttgcctgttttcctgccatcgttatctctctcggttttatttttgtgggctgtccagcagcatatccatctcgaactggcgcaggggatcctgccgccagccaagatgcgtaaagaagggggcggccacctcgggcacaaaaacgttggcggtcagcggcaaaggggcgaaccgcgtttgcagggcggccagcaaggcgcgggcatgcccctggccgcggtgctgcggcggcacgtagatcaggcgcagccagcagtgctcggcgccgggcatcaccacggcgtaggcctgacgattgagcgtataggcttgcggtgtgcctggcagcttgaacagcgattcgggagcgatcaaccagggcagatcggtggcgccttccgccgtcaggcgatggctgacggtcagcggatcgaccgcctgcagcgccgccgtgcctggcggcacttccgccggcgcctgatggccggtcagggtgcgcacgatgcgcagcccggcgcggtggtacagcgccagcgcggcgtcgttgccttcgatcacctccagcgacagccgccgatcgccgcgctggcgggcatccgccatcagccgctgcatcagcgccttgcccagcccctggccgcgcatctccgggcgcacggaaaaggccgccacccggctgtgccggccgcggcgggcgatcagcgccaccgccaccggttcatggcggtgagtgacgatcaggctgtcgttcaggctgaggtcttcggcgcagaagcgggcggcgaaggttgaaccgtcgagcacgaaacgcacgatgtagttttcaaaacagtggttgaggatgttggccagttcgtcgctgctgtagcgcaaggcgttgtggtagtcgaagcgtccgtcgttatgcatggctgattccgctcgggggaaagctatacatgtagacccgtttgttttgcaaggcaagcggggggattcgccggcggggaaaataaaaacaaaaaagccggacgcagccgcccggcgaaataaaactctgggtatcaagtgacgctaaagtttgcagtggtggttattcattcatcacatcagaactggtaggtcagggcgacaacaacgacgtcgtcgtttttcagacccagcttgttgtcgtcatcaagctggttgattttatattcgacataagtggacatgtttttgttgaagtaataggtcgccgctacgtcgaaatatttcaccagatcgacgtcgccgatgccttcaatatctttgcctttctgctgaacgtaacccagcgatgggcgcagaccgaagtcgaattgatattgcgcgaccaattcaatcccttccgctttattggcgaagccgctaacggaggtcgagttattattgatggtagcggtgccggaaataggcgcgatattgcggctctgcgaataagtcgcggccaggtagacattgttgttatcgtatttcagaccgccggcccagatatcggccttgtcgcctttaccgaaggtgcccgccttttgcgtggcggtgcggttggaagaggcataggcggcgcccacgctcaggccgtcgatgatttcatagctggaggaaagaccccagccgtcgccgttcgccttgctggcggagcggccgtcgttttcgttcttgccctggtactgcacggcaaatttcaggccgtcaaccagaccgaagaagttgttattacggtaggtggcgacgccattggtacggccgttcataaagttgtcggtcttgatataagcatcgtcgccgaattcagggatcatatccgtccaggcgccaacgtcgtaaatgataccgtagttgcgaccgtagtcgaaggagccgaggtccttatatttcagaccggcgaagcccagacgcgttttggtgtctttggtgccgtcggattcagaatggttggcggcgatctgatattcccactggccatagccggtcagcatatcgttaatctgagtcgcgcctttaaagccgatacggacgtaagttttatcaccatcattgccggcatcatcagagaaataatgcagggctttcacacggccgtaaaaatcgagtttgttgccgtctttattgtagatttctgctgcctgtgccgcttgcgcaagtaaaagtgccggaataataacggccagaagattacgtttcatgggttaccctgctttattcgattgaaagacgcttatcatcagttgcattgctgttttactgtgccgcctgattgttggcggcggagaatttttaccgtagtaatgtgatctatttatgacaaaaaattcattttcatgtcgaacgattaaaaaagtcgcgcaaagggtgaattttttcttcagccgatggtctgcggctggtctacagttaccgataccttgttccgctgcgggaggaatcatgcacgatacttatactttgttcggtacgcagggctgcggttcgaccatcgtggccgccgcgttggcgttgactgctttcccctggggctatgaggaggtggattacacgcaggacggcccggaacgcgatcgcctgttggcgctgaacccgctgggtcaggtgcccaccttagtgctgcccaatgacgaagtgatgacggagagtgcggcgattatcctgctgctgcacgatcgcgcgccgcatgccgagctggcgccgcccggcggttcgccgctgttgccgcgttttctgcgctggctgctgttcatcaacgcggagatttaccccaccttcacctatgccgaccatccgcagcgctggcagccgcaggcggcaggggcggaacagctgaaaaacgcggtaatggattatcgtgagcgtttattgcggcagttgaacgccgccgcaggggcgtctggcccgtggtttctcggcaagagcttcagcgcgttggatctgtacgtggcggtaatgtgcaactggcggccgggccgcgcgtggttccggcaacactgcccgcggctttacgccattgccgaacgggtggagcggcggccggagctgaatgcgctgctgagcgcccatttcgacggcgttgcctcgctggaaccgtgaaatcgccccgccgcctggcggggaaccctcccgtttttctgaaccgagagtgccgaaaatcccgattttcactcgcctcggcggcgggtagcgtaaggctatccgcaactgacaggagagtgtgatgccatcaaaatcccaggccgggcaacaggcgttcggcgagatcgcccccaagctggcgcagctcagcgacagcgtcttgtttgacgatgtctggcagcggccagagctgagcccgcgcgagcgcagcctgatcaccgtcgccgcgctggtggcgctcaaccgcctggagcaactgccgtttcatctgcagctggcgcagcgcaacggtgtcgatcgcccgcaattggcggagctcatcacccacctggcgttttacgccggctggcccgcggcggcgtcggccgtggcgcgcctgcgcgagctggaaccggaggcgccccatgccgtttagccgcatcgccctgcatcagggcaagtccgccgactatctgcaaaccttgtccgacagcctgcatcaggcgctggtggaggccttcgaggtgccgccggcggacaggtttcaggcgatcgatcaataccgccccggtgagcttatctacgatcgcgactatctcggcgggccgcgcagcgcggatttcgtgctgttttacatcaccgccgggcggccgcgcgacagcgacaccaagcggcgcttctacgggcggctggcggcgctgctggcggaaaacctgcggctgaaccccgaggatgtgatggtggtgatcgccaccacccagttggacgagtggtcattcggcggcgggcgcgcctcaatgatcgatccgcagacgtaactcgggctgacgtcgtcggcggtctgtgggacaatagcgccatcatttcgtttagataagagttgaatggcgctctcctccgcagttaaagatcagattggccagtggtacaaagccctgcagcagcaaataccggattttatttcccgcgcgccccagcgccagatgatcgccgaggtggccaagacgctggccggcgactacccgcgccatctggcgatcgaggcgccgaccggcgtcggcaaaacgctgtcttacctgatcccgggcatcgccgtcgggcgggcggagagcaagccgctggtggtgagcaccgccaacgtggcgctgcaggatcagatttacagcaaggatttgccgctgctgaagaagattatccccgatctgaaatttaccggcgcctttggccgcgggcgttacgtctgcccgcgcaacctggcggcgatgagcaccgacgtcagtcaacagggcgatctgacgctgttcctcgacgacgagctggcgccgtccagcggcgaagagcaggcgctgtgccagaaactgaccaaggcgctggcccgctttgagtgggatgggctgcgcgatcactatcagcagagcatcgacgatccgctgtgggccaagctgagcaccgacaaggccaactgcctggggcgcaactgtcactacattcgcgaatgcccgttctatatcgcccgcaaagagatcgagagcgccgacgtggtggtggccaaccacgcgctggtgatggcggcgctggagacggaatcggtgctgccgaacccgaaagagttgctgctggtgctggacgaaggccaccatttgccggaggtggcgcgcgacgcgctggagatcgacggggaaatcaccgcgctgtcgaccaacctgcagctggacatgatcgtgcgccaggtcgaacagtgcatgacgcagtatcggccgaagaatccgccggggctggccaacagcgaacggctgaaaaaccattgcgaggagctgcgcgaactggtgcagatcttcgagcatcaggtcagcgcctacctgcccggcgacagcgtggccgccgagcaccgttttgaaatgggcgagctgccggcggagatggtggagagttgcgcgcggctgtttaaactgaccgatgcattgcgcgggctggcggagttcgtgcttaacgatcttactgagcagaccggcaagcacgacatcatgcgcctgcaccgcgccatcctgcagatgagccgcacgctgggctatctggaagcgatgagcaagctgtggcggctggcggcgctcgacaagtcgtccaacgcgccgatctccaaatgggtcacgcgcgaactgcgcgataacgtcacccatctgtatttgcactgcgtcggcatccgcgtcagcgatcagctggagaagctgctgtggcgcaaggtgccgcacgtggtggtcacctcggccacgctgcgttcactgaacagcttcgcgcgtttgcaggagatgagcgggctgagcgagaaggccggcgatcgcttcgaaacgctctcttcgccgttcaatcacgtcgaacagggcaagattgttattccgcagatgcgctatgaaccggcgctcgccaatgaggcggagcacctcgaggagatggcgcggtttttccgcgccgagcaggcgagcggcaagcacaaaggcatgctgatcctgttcagcagccatcgggcgatgcagactttcctcagctacgtgaccgatctgcggctgatgctgctggtgcagggtgaccagccgcgctaccggctggtggaagagcaccgcaagcgggtggagaagggcgtcgccagcgtgctggtggggctgcaatcgttcgccgaagggctggatttgaaaggcgaactgttgacccaggtgcacattcacaaaatcgcgttcccgccgatcgacagcccggtgatcatcaccgaaggcgagtggctgaaatcgctgaagcgctatccgttcgaagtgcagagcctgccgagcgcctcgttcaacctgatccagcaggtcggccgtctgatccgcagcaaccaatgctacggcgagatcgtgatctacgatcgccggttgctgaccaaaaattacggttcgcggctgttggcgtcgctgccggtgttcccgatcgagcagcgcgcggtgccggaggccgacaaggcgcatctggcggcgctgaaatccgccgccgacgcggccaaaaaagagaagaagcgcggcaacccgttcgcccgcaagcggcggcgttaatcagagcagcggcggcaggcggcgcttgaccggcgtggttttcacgatcgaggtgttgctctgcgcatgctcggccaaccgatcgagggtgtggtcgagctgttccatcgagtgcgccaccagccgcacgataaagcagtcttcgccggtcaccttatcgcattcgaccacttccgggatcgcctgaatcagctgctcgaccttcttcagcatgcccggcagcggcttgatgcgcaccagcgactcgaaggcgtagcccaccgcctgcagattgacgttcagggtatagccctggatcacgccgctttcctccagccgccgcagtctttccgacgtgctcggcgacgacaggcccacctgcgcgctcagcgtcttcaacgatgcgcgcgcatcgtccgccagaatggtcaggatttggcgatcgatatcatccataacgcctccgttaggtattttatttattatagctgcgagaaaaaggcagttaagcatatctgccttttttatgctatggaaagccgcccagcgaagccgcaagctatgtctctgggcaagcttcgaggaacgcagaatgaatgcagagataaaacgcggatcgctggagatggcggcggcgatgttgatttccggctccatcggctggtttgtgttgatgtccggccagccggttatcaacgtggtgttttggcgctgcgcggtaggcgcgctggtgctgctggcggtgtgcggcgtattggggcagctgcggcgcgatgcgctgacgcgcgccacgctgctgctggcgatcgccggcggcgtcgcgctggtgatcaactggctgctgctgttcgccgcctattcctatgcgtctatctccatcgccaccgcggtgtacaatacccagccgtttatgctggtggggctgggggcgctgtttctgggggaacggctgatcgcccgcaagctgctgtggctggggctggcgttcggcggcatgatgctggtggtgctggcgcagccgcggcaggcgggggagcagagtcattatctggcgggcatcgcgctggcgctcggcgcggcgtttttctacgccctgatggcgctggcggccaagcggctgaagggcacgccgccgcatcttattgcgctgatccaggtgacggtgggggcggtgatgctgttgccgctggtggatttccacgtttcggccagcgtggggcagtgggggatgctggcgacgctcggcgtgctgcacaccggcctgatgtacgtgttgatgtacggcgccctgcagaagctgcccaccaatctgatcggctcgctgtcgttcatctacccgatcgccgctatgctggtggatcgcctggcgtttggccaccggctgtctgtgtggcagctgctgggcgcggcgatcatcctgctggcggcggcgggcatgaacctgctgggcgagcggcgagcgcggctgctgccggcctcggacggccggcgcgccggctgatgctcagcgcggttttttcagccggcgccataaagtggtgcggctgatcccgagcaaccgggcggcagcggcgtggtcgcctccgcaccgcgccagggcttcgtgggcggagacgggcgccgccggcgtctcgggcggcggcgccaccgccagctccggcagcagccactgcagggtctcgccgctcggcgcgacgccggtgctcagcatcagcgccacccgctccatcatgttgcgcagctcgcgcaggttgccgggccaggcgtaatgactgagcgcggcgtaacagccggccagggcggtgcgcagcggctccgtcagcggcacgtcgagcgccgccagcgactgtttcagaaagtgttccgccagcatcgcaatatcgtcgccacgcgcccgcaacggcggcagctgcagccgcagggcgctcagacggtagaacagatcggcgcgaaaatcgccgtgttgaatcgcctgctccaggcgattgtgggtggcgctgataacgcgaaaatcgaccgccaccggctgttgcccgccgacccgcgtgatggttttctcttccagcgcccgcagcagccgggtttgcaggtgcagcggcatttcgccgatctcatccagaaacagggtgccgccgttggcggtttccaacagcccgcgtcggccgccgcgccgtgagccggtgaaggcgccttcctcatagccgaacagttccgcctccagcagcgattcggcgatggcgccgcagttgatggcgacgaacggcggcgtcgcgccgcgccgggaaaagtattcgcggtggatcgcctgcgccgccagctctttgccggtgccggtttcgccttcgatcaacaccgccgccggcgatcgggcgtacagcatgatggtgcgccgcgtctgctccatctgcggggaatcgccctgtaaatcgctcagcccatagcgcggctgcagggtattgcgcgcggcgtagtcaccgccacgtttggcgccgcccagcatcaggcgcgtcacgtccagcgcgtcgctgaaggcggcgcgcagggtggcggcggaatagagaaaaatggcggtgagcccggcctcttccgccagatcgctgatgaggccggcgccgaccacggcctgaatgccggcggctttcagctcggcgatctggccgcgcgcgtcctcttcggtgacgtagctgcgctgctccagcggcagatcgaaggtttgctggaactccagcagcgcgggcaggggcgttttgtaggtgatgacgccgattcgatcggcggttctgcgcgccttgcttagcgcctgcagcaggtcgaagccgccgggcttgaccaaaatgaccggcaccgacaggcggcttttcaggtaggcgccgttggagccggcggcgatgatggcgtcgcaaggctcggtcgccaggcgatcgcgaatatgctgcaccgcctcctcgaagccgagacggatcggggtgatggtcgccagatggtcgaactcgagactgatatcccggaacagatcgaacaggcgggtgatggagacggtccagatcaccggtttgtcaggcgtgcgggacggcgtgatgtgatcgctcatggtaggttaccgaatgaaagtggctgcattaggtgtagccttgtttcattcatgtttcaaacatgccgagtgaaaccgcgattgaaacgttaactgaaacgttttttatcgcttggtctgcccaatggcgacgcgaattttataactcacttatttttatcgcttttaattttttccccgccaaagtgcaacctggcccgccccttgctctgtctgttccatctagctaatcggagagaacgtcatgacgctgcgctcacccgggctcgcctttcgtcaggccctgagtaaagagaaacccctgcaaatcgccggcgcgatcaacgccaaccatgccctgctggcccagcgggcggggttccaggccatctatctttccggcggcggcgtggcggccggttcgctggggctgccggacctgggcatttcgacgctggacgatgtgttgaccgatattcgccgcatcaccgacgtctgcccgctgccgctgctggtggatgtcgacagcggtttcggcgcatcggcgttcaacgtcgcccgcacggtgcgcgcggtgagcaaggccggggcggcggcgctgcatatcgaagatcaggtcggcgccaagcgctgcggccatcggcccaataaggccatcgtttccaccgaagagatggtggatcgcatcaaggcggcggtggatgcgcgcagcgatccggacttcgtgatcatggcgcgcaccgacgcgctggcggtggaggggctggaggcggccatcgagcgcgctcaggcttacgtggcggccggggccgacatgctgttcccggaggcgatcaccgagctgggcatgtaccgccgcttcgctgaagcgacgcaggtgccgatcctcgccaacatcaccgaattcggcgcgacgccgctgttcaccaccgacgagctgcgcagcgcccgggtggatatggcgctgtatccgctgtcggccttccgggcgatgaaccgggcggcggagcgggtgtaccgcgccctgcgcgaggagggcacgcagaaaagcgtcatcgacaccatgcagacccgcaacgagctgtacgaaagcatcaactactatttgttcgaagagaaactcgacgctttgttcgctcgccagcgcgacgaataagcgccattcacgcagaagccaaatgaggacagtatgagccaagcgatccccccgcaaagcccgactggcgttaagccgaaaaaatccgtggcgttatccggcgtgcccgccgggaataccgcgctgtgttccgtaggacgcagcggcaacgatctgcactaccgcggttacgacattctcgacctcgcgcgccactgcgagtttgaagaggtcgcccatctgcttatccacggcaagttgcccaaccgcgacgaacttcatgcctacaagcagcggctcaaagcgctgcgcggcctgcccgccagcgtgcgcacggtgctggaggcgctgccggcggcatctcacccgatggacgtgatgcgcaccggcgtttcggccctcggctgcaccctgccggaaaaagaacagcacggcgcggccggcgcacgcgacatcgccgatcggctgctggcgtcgttgggatcgatgctgctctattggtatcactacagccacaacggcgagcgcattcagccggagaccgacgacgactccatcggcggccacttcctgcatctgctgcacggcgcagcgccttccgccagctgggagcaggccatgcatgcgtcactgatcctgtacgccgagcatgagttcaacgcctcgaccttcgccggccgggtgatcgccggcaccggatccgacgtctattcggcgatcgtcggcgccattggcgcgctgcgcgggccgaagcacggcggcgccaacgaggtgtcgctggagatccagcaacgctatgaaacgccggacgaagcggaagccgacattcgccgccgcatcgacaacaaagaggtggtgatcggcttcgggcacccggtgtacaccgtctccgatccgcgccatcaggtgatcaaagagatcgcgctgcgcctgtcgcaggaagcgggcgcgatgaagctgtatgacatcgccgaccggctggaaagcgtgatgcgcgacaccaaaaacatgttccccaacctcgactggttctcggcggtgtcttaccaccagctgggggtgcctaccgaaatgttcacgccgctgtttgtcatggcgcgggtgagcggctggtcggcgcacatcatcgagcaacggcaggacaacaaaatcattcgcccgtccgccaactataccgggccggaagcgcgggcgttcgtaccgctggatcagcgctgagcgccgatcgttatcgtgtcgttttcactatggagcctttggggatcatgatgcttgagtctgccaacaccggccgtccgccgttcgatcgcgagatggtcgatatcgtcgattatgtgatgaaagaggccgtcgataccccggcggcgtaccgcaccgcccactattgcctgctcgataccctcggctgcgggctggaggcgctgagctacccggcctgcaagaaactgatggggccggtggtgccgggcgccgaggtgctgaacggcagtcgggtgccgggcacccgtttccagctggatccggtgcaggcggcgttcaatatcggcgccatgatccgctggctcgatttcaacgatacctggctggcggcggagtggggccacccgtcggacaacctgggcgggatcctggcggtggccgattggctctctcgccaggcggtggcggcgggcaaagcaccgctgaccatgcggcaggtgctgatcgccatgattaaggcgcacgagatccagggctgcctggcgctggaaaacgccttcaaccgggtggggttggatcacgtgctgctggtgaaggtggcgtccaccgcggtggtggcgcagctgctcggcctgagccgcgaggcgatcctgaacgcggtgtcgctggcgtgggtggacgggcagtcgctgcgcacttatcgccatgcgccgaacgccggcacccgcaaatcctgggcggcgggggatgcgaccgcgcgcgcagtgcggctggcgctgatggccgccaccggcgagatgggctatccctcggcgctcacggcgccgacctgggggttctacgacgtctcgttcaacggcgaacctttccgcttccagcggccgtacggcgcgtatgtgatggagaatgtgctgtttaaaatttcgttcccggcggagttccatgcccagaccgccgtggaggcggccatgacgctgcaccgccagatgcaggccgccggcaaaaccgccgccgatatcgccagggtgagcatccgcacccacgaggcctgcctgcgcattatcgacaagcaagggccgctggataacccggcggatcgcgatcactgcattcagtatatggtggcgatcccgctgctgttcggccggctgacggcggccgattacgaggatcgggtggccgaggatccgcgcatcgacgcattgcgcggcaagatccactgccatgaagatcccgccttcacgcgcgattatcacgatccggaaaaacgctcgatcgccaatgcgctgacggtggagttcgccgacggcagccgtctggatgaggtggcggtggagtatcctatcggccatgcgcggcggcgcgaagagggcatcccgctgctgatcgagaagttcaaaaccaacctggcgcgccagttcccggccctgcagcagcagcgcattctcgaggtgtcgctggatcggcagcggctggcgcagatgccggtcaatgagtacctcgatttgtgggtgatctgacgcgagcggcgctgacaagccacgtcggcgtcgctatgatggaggctccatccccgtccgtcttcttatcaggtgattcatgattgatgccgcaacgctgttgttgttttccggcgcctgcgtggcgctggcgctgacccccggcccggatatgctgctgatcgcttcgcgcagcgtcagccaggggcggcgcgccggtttcgcttcgctggcgggcatccagctcggcacgtactgccacgcgctggcggcggcgctggggttgtcgcaactgttcgtcgccgtacccctggcttacgacgcggtgagaatgttgggcgcggcctatctgctctatctggcgtggaaaacgctgcgatccggcagcagtctgcaggcttccgccgggttgcaggcggtgccgacggcgcgcattttccgtcagggattgttcaccaacatcctcaacccgaagatggcgctgttcgtgctggcgctgttcccgcagtttatcgatccgcgcgccggctcggtggtggtgcagatgctggcgctggcgacggtgctgaatctggtcggcttgctgattaacggcggggtgatcctggcggtcagcggcatgaaaagccgttttgtcggccgtcgcttcagcgcccgctggccgaactatctgctgagcggcgtgttcgccgggctggcctgcaaactcattttcgacagccgtcgttaatcttcgcgcagcagcgcttcaaacgccgcgctggccggttcgtccggcagcgcgctgtacatcaccagccgcaggtggttctcttcgtcgacgatgaaagaggcgtggtcaaaggtgaccgggccgatctccgggagggtgaagctgcgccgcccctggcaacgtccgtgaatatcatgctgccgccagagctggcggaactgcggcgatacctgctccagcgcctgtacccgttggcgcatcacctcatcctccggcgcacgggcgtagtcgcggcggaagctggccaggatttgcggcgcctgcgcccgccactccagcaggcgcgcattgagctgcggatcggcaaacagcatccacaacatgttgcgctcttgcgccgggcgctcgccgatggcgaacagccgctgcgccgccggattccaggcgatgatgtcccaactgaggttcatgacgtaggccggccgcagcgtcaggtcgtccagcaggcgccgcaccaacggcgaaacctggcaccactgatggccgaccggcaccggcgggcgctgatgcgccaataaaaacaggtggtagcggccggcggcatcgagctgcagcacccgcgccagattttccaaaaacgtcaccgacgcattgatttccctgccttgctccagccaggtgtaccaggtgaggccgacgccggccagcgccgccacctcctcgcgccgcaagcccggcgtgcggcggcggctgccgctcggcaagccgactgcctccggcgacagttgttctcgcttttgccgcagaaaatcccccagttcgtggcgggtgcgttcgagggtgcgtgggggcatgtcggccgtcctgttgctgtcagtaatagtataaatggctatatagtaacagtttaaactctattccatactgcgaccatcataatctctggaggtggtatggaacattcattatctgttgaacggcgaggattgcccggcctgccggtgctgctgttgggcggtttcgtcacggtgttcgatctgtttgtggtcaacgtggcggcgccggtgatccagcaacagttcgccgccgatttcgccggggtcggtttgatcgtcgccggttatgaactggcgtttggggtgctgttgatcgccggtgggcgtctgggcgatcgcttcgggcgtcggcgtctgttcagcctcggcatgctgggattcacgctgagttccctgttgtgcggactggcgggatcgctcagcctgctgatcgccgcgcgtatcctgcagggggcggcggcggcgctgttgttcccgcaaatttacgccttgatgcgggtgctgtacgcgccgcaacagcggcggcgcgctttcgcctggctgggcatgacactggggttggcggcaatcttcggccagatcctcggcggatttatcattgaggccaacctgttcggcagcggctggcgcatgatctttttgatcaatttgcctatcggcgcgctggcgctgtgggcggcgcggcgcattcccgaatcgcgggtggcgcaggcgcagcggctggacggcgtcggcctgtggctggcggcggctggcctgtcgctgttgctgctgccgttgctggaaggcccggcgcgcggttggccgtggtggatcgcgccgatgttggcattggcgctgctgacgctgtggggcttcctgcgttgggaacgccgcctggcgcagcgcggtgatgatgcggtgctcgatccggcgctgttccgccaggcgggcttcgcgccgggtatggcggtggtgctggcgatttatgccaccgcttcctcgtttttcttgtgcttcgcgctgctgctgcaggcgggggcggggctgacgccttttcaggcgggcagcctgttcgccccggccagcgcggcctttatgctggcctcgatgctggcgccccggctgacgctgcgttggggcaacggcgtgctgagcgtgggcgtggcgatttacgccgccgggttggcgctattgatggcgcaggcgctgtggggggaggcgctggcgcatccgctgcggctgctgccggggttggtggtgttgggattcggccaggcgctgagcatgacgccgctgctgaatctggtgctgggtttggcgcaggagcggcaggcgggcatggcggcggggctggtggccaccgtgcagcaggtggggggcgcgctgggtatcgtggtcagcggcgtcggttttgtgccgctgttggcgagcggcggcgcggcggaacgctatgcccaggcctttgccggtgcgatgctctgtaatttggtggcgatgggcgtcgccctgatcttgttaaaccggatcactcgaaatactcagaaagcggatcttaagtaggccgccggcgggtgctttactgtcgtcatcatgagagcgcgataaggagccacactgatgtttcaacccgccgcatttcgcgaagacgatctggatgcccaactggcgttggtgcgcgcccacccgctggggctgttggtcagccacggcgagcagggattgacggccgatccgttgccgtttctggccgatgtcgaacaggggcagatccggctgcgggcgcacctgtcgcgcgccaacgagcactggcgacgtttgcaacaggcggcggaatgtctggtgatttttcagggccaggagggctatgtgtcgcccggctggtacccgagcaagcgccagaccggcaaggtggtgccgacctggaattacagcgtggtgcaactgcatggcgtgccgacggtgacggacgacccggcctggctgcgccgccaactgatcgatctcaccgcgcagcaggaagggcggcgtcctgaaccctggcggctcgaggatgcgccggccaactacatcgccgcacagcttaaaggcatcgtcggtattgagatcgccgtcacccggcgcgaaggcaaatggaaaatgagccaaaaccgcagcgccgaggatgccggcggggtgatcgccgggctgcgcgatggcgatgaagcgcagcggcgactggcggcggaggttgagcggcggcgcggatagggtatgctaaccgaagagtgggctgagggaaccttcggatggattacaccaaaattatcaaagaaataggccgcggcaaaaaccatgcgcgcgatctggatcgacagaccgcctttgagctgtatcaggcgatgctggccggggaggtccccgaacttgagctgggcggcattctgatcgcgctgcgcatcaagggcgaagccgaagaggagatgctggggttctaccaggcgatgcagcagcaggtattgtcgctgcaggcgccgcaggggaggccattgccggtggtgctgccgagctacaacggcgcgcgcaagcaggccaacctgacgccgctgctggcgctgctgctggcgaaagtgggcctgccggtggtggtgcacggcgtgctggacgacagcacccgcgtgaccagcgccgagattttccgcgcgcttgggctgccgtggtcggaacaggccgctcacgcccaacagcgtctcgataacggcgaggcggtattcatgccggtttccacgctgtcggcgccgctggcgcggcagctcgggttgcgttggcgcatgggggtgcgcaacagcgcccatacgctggccaagctggcgacgccgttcggcgaacaggatgcgctgcgcctcgccagcgtttcacacccggagtatgtcggccgggtggcgtcgtttttccgccagatcggcgcccgcgggctgctgatgcacggcacggaaggcgaagcttacgccaacccgctgcgctgcccgcaaattcaccacatcgtcggcggcgaacagcgcatattgctggagcgcaccttgccggatgaaacgccggcattgccggcggcgaaagacgcggaaaccaccgcgcgctggactgaacgctgtctggcgggcgaggtggcgataccgcaggccatccagcggcaggttgcctgttgcctggtggccgccggcgagagcgagacgctggagcaggggctgaaacgcctgcatcaggcctgagcgcgactatactgggatatttcctcatcggctgagaaggacggttatgcaacaggctctcgattacttcaatcaattgaaccaggattacctcgacgtacaccgcgccaaagaagagctgttctggcaaaactacatgggcaccggcggtgaagacgtctcggcgcgcttttccgccgcggaaagcgcctataagcgctttatcgccgaaccgcgccggctggcggagatccgcactctgctggccggattggaagcgttgccgcaggaggcgcagcgcgatgcgctgatccacggtctgcaaggttggctgcgctttttcgactgcaacgccatcgaagatccgcaggcgcaggcgctgttggatcagatcatccacgccgaatccgatctctactcgcgccgcaagggctatcaggtcacccatctgaacgccgacggccagcgcgtggcggcttcgctcggcgagctgttgaccaaccaggcgaccaacccgaacgaagactaccgccgcagctcgcagcaggcgctgcgcgatctggagcaatggctgctgcataacggcctgccggagctgatcggcctgcgcaaccgctttgcgcgccagatgggctatcgcaactatttcgactacaaggtgaacaaaaccgagcgcatgacgccggagcagctgttcgccattctggatcgcttcgagcgggaaacccgcgaggccaacgcgcgcagcctgcagcagctggcggccgacaagggcgaccaggcgctggagccatggaacgtgcgcttcgccagcgccggcgacgtcacccgccaactggatccttatttcccgttttcccgttcgctggaacgctgggtcgacagcttcaaacgcctgcacatcggttttggcggcgcggagatgaacctcgatctgctggtgcgtaaaggcaagtatgagaacggcttcatgcacggcccggtgccgccgtttgtgcgccagggggaatgggtgccggcgcgcatcaacttcaccagcctggcgcagccggggcaggtgggcagcggcgcttacgggctcaacaccctgttccacgagggcggccacgcggcgcacttcgccaatattcgccagaatgcgccgtgcttctcgcaggagttcccgccgacctcgatggcctatgccgaaacccagtcgatgttctgcgatagcctgctggacgatgccgactggttgaagcgctatgcgaaaaacgccgccggcgaagcggtgcccgatgcgctgattgaggccggcatcgcggcgcgccagccgatgcgcgcgttcaacgaacgccatatcctgctggtgccgtacttcgagtgggcgttgtatcagtgggatgacgagcagcgcacgccggaagccatcaccgcgctggcgcgcgaggtcgagcagaagatcctcggcatcagcggcagcccgcgcccgacgctggcgatccctcatctgctgtcgctggagtccgcctgttcttatcagggctacctgctggcgatgatggcggtggagcaaacccgtcatttcttcctgcagcgcgacggttacctgacggacaacccggccatcggcccggatctggcgcaacactactggttgccgggcaacagcgtcagccatgacgacacgctgcgcagcctgaccggcgaagggtttaatccggactatctggcgcaggcctgcaaccagacggtggcgcaggcgtggcatgaggcgcagcagacgatggccgccgccgccgcccgcccgcagccgccggcggatttcgatttgcaggcgcatattcgggtggtggatggcgagacggtattggcagacaatgccgacggtgacgaacggatgtgccgcgacttcgctgcggcgatagaggcgcgtttggtttaaggctgacaataaaatccacgcggaagcgtggattttatttaatggttaaaaccaggcgtgattttattcgaaatagacgtcgggattatcggccagagacacgaagctcttggtgtttctatccagcgtgcgaatttcgccgctttcgatgtcgtacacccagccgtgcaggcgcagcccgctgttgcgcagacccaccgccacagaaggatgggttttgatattatttagctgagcaataacgttctcttccaccatagcgttaactttgtctgtttcgctattccaggttttcttctcgaccaccgcttttgccgcatcggcatagtgcagccagtgagctaccgcaggcatagggtcgaggcactggcaagacgcgatagccttcatggcgccgcagttcgagtggccacaaatcacgatatcggtaactcccaacgccaccactgcatactcgatggtcgcagaaaccccgcccggctccgggccgaaggaagggacgatgttgccggcgttacggataacgaaaagctgcccaggttcttgctgtgtgaccagctcaggcactaaacggctgtcagagcatgagataaacagcgctttgggattttggctggaggcaaggctgcggaacagttccttgcgctgcgggaaaatctctttctggaaactgaggaaaccttcaatgatatgttgcatacaacgctctctgcatctgtagtctgcgtaacatgataatcatcctctcccgttagtccagccatgggcaggtaaaaaaatgtgtgtgcaagccccccgcaaaccccattgaatacagggtttctgcctgtttgcgacagaattttccggcttgttggcgcgtggattgctgacaaagcggacggcaagaaattcgctgttgtgcccattcagcgctgacgtacgcgaacataaaaaaagcccgccggggtgatagccggcgggctttttgacgtctggggcggcgattatttgtagataaccgcggtggcgtgcatcaggttattgccgctggtggaggtgatggtgaaagccttggcgcccgccgcatcggctttggcggccagctgagacttcaggctgctcaggtcggttgcgccgctggcgacgatcacgccggctttttcgaattgggcggcatcctgcgcgctgacgtgttcagcggcgaaagtggtgaaagaaacggtagccagggcgatagcggcagcaaaagttttgatggttttcatgttggtcattcctgtcaaagtgaattagggagaaaggggtttgcctttcgatgggaggattattgcgcagtgacaggcgggatgaaatcggagagtgttgacagttttgttcagattttttgattattaattcccccgttcatcttctgcataaacaggggggagacgatcagcgcgtcgggcgcgccagatcgaaacggtgctgttcggaaatgccatagtaggcggttgggccgccggcgcgcaggataggttcggcagcggcggtctggtagacgccgtgttcgtccagcagcgccggatcgaggtgcaccgccaccacttcgcccaatatcagccaggtctccacctgttcgccggcggcggtttgcagctgaatgcactgggtaaggcggcattcgaagttcaccgggctttcggccacgcgctcggctttgacccggcgtccgggcagcggcgtgacgccggcgaaggcgaattcatcttcgccgcgcggcaggttgattgcactgtggttcatcgcttccgccagcgggcgtgtcgccaggttccagacgaactcaccggtttccacgatattcgccacgctgtctttccaaccggtgctggcgaaaccgatgatcggcgggcgatagttgaagcagttgaaaaagctgtagggcgccagattacgcaagccggcggcgctgcgggaagagatccagccgatggggcgcgggccgacgatggcgttcagcggatcgtgcggcaggccgtggccggcggcgggttcataataataacgagattcacggttcatgggagaccctgcggcaatcgatgaagctttcattgtgccgggtttcccgccgctgcgccattgcgggccggatgtgttatcttacgcgccggaaatcccttcaagagagcccgtcacggtggaaaaaaagaaaaccttcccgcagcagaaaagcggcctgcatccgcgcaaccgtcatcgttcgcgctacgacttcccggcgctgatcgccagttgcccggcgctggcgccgttcgtaaaaccgaacgcctggggcgatgtctcggtggacttcgccgatccggcggcggtgaaaatgctcaaccgtgcgttgctgcaacacttttacggcatcgaacactgggatattccggctgattatctgtgcccgccgatccccggccgcgccgactatctgcatcacctggcggatctgctggcgaccagcaacggcggcgagatcccgcgtggcaagggcgtggcgatcctcgacgtcggcgtcggcgccaactgcatttacccgatcgtcggcctgcgcgaatacggttggcgtttcaccggctccgaaatcgatccggtgtcgctcaactcggccaagatgatcgtcgagatgaacccgacgctgcgcaacagcgtgcgcctgcggctgcaaaaacagcctgagctgattttcagcggcattatcggcgcggccgagaaattcgacgccaccctgtgcaacccgccgttccacgcgtccgagcaggaagcgcgcgccagcacccggcgcaagctgcataaactgggcaaaggggaagtggccgacaagccggtgcaaaacttcggcggcaagaacaacgagctgtggtgcgaaggcggcgaagaagcctttgtgcgcaagatggtggcagagagcgtcggcaaggccaacaactgcctgtggttcacctcgctcatctcgaaaaacaccacgttgccggccatctaccatgcgttgaaagtggcgggggcggccgaggggcgcaccatcgagatggcgcaagggcagaagatcagccgcttcgtcgcctggaccttccataacgccgagcaacaggccgcctgggcagccgaacgctggcgctaatctccccggcgccggttatcctgccggcgccgacaaaaatccgcattttacctttcaattttcatcacttacgttattctcattacgcatttaataataaaaatcttaggttgttggtttatttaaattcgaataattactttactgaataaataaatttaatccggttaatagcaataaccagaaggttcggcgctgcccgttccttccgcgatggcacgtctgcgtgtgggcgcggcatgtggccagacaaaataagaaaagcgccatcatctgccacaaggactacaccttatgctgttacgattcagtcagttaactacccacaaaggcgccgagctgggcgcgatagaacacgccgttcccatgatcgtattctcgcccgacggcacggtcttgcgcgccaacgatctcttcctcaacacgctgggatttcaacgcgatgacgtgattggccggcatcaccgtattttctgcgatccgaactatgtcgccagcccgttgtaccgcaagcattgggagacgctgaataaggggcaacccatcacggacaccctaaaacgcatcgcgaaaaacggcgagacggtatggctgcagggcacctacgcgccggtgctgaataaacagggtaaggtggtggaaatcgtcaagatcgccagcgaagtgaccgagcgagtgacccaggcgcaggaacaccgcagcctgctggcggcgctgaatcgatcgatggcgatgatttctttcacgccgcagggcaccattgtcagcgccaacgacaatatgctggcgctgatgggctatcggctggatgaggcgtgcgggcagtcgcatgcggtgctgtgcccgccggcgttcgccgcttccgacgactatcggcggcactggcagcgcctggcgcgcggcgagttcatcaccgggcgttttgagcgcgtcaaccggcgcggcgaacgggtatggctggaggccagttacaacccgatcctcgacaatgaaggccaggtggtgaaagtggtgaaaattgcccaggacatcacccgattgatgcaacagcagcagcacgaagaagagatggtgcgcaacgcgcatcatctgtcgctggatactgaccggcaggcggcgcagggcgcggtcatcgtgcagcaggcggtgaagggcatgcagcaggtcgaagcggcggcgcgcgaaacctcggacgtggtcaccgagctcggcaagtgctctcagcagatcggcaccattgtcgaagccattcgtaaaatcgcctcccaaaccaacctgctggcgattaacgcctccatcgaagctgcccacgccggtgagcacgggcgcggttttgcggtggtggccaacgaggtgcgcacgctggcggaacagtcgcgcaaggcggcgaccgagatcgaacgcatgaccaagtctatccagcaaggcgtggcggcggcgatcgccggcatggcgacctgcgtggaacaggccggcggcggtgtggcattgacccatgacgccggagaagtgatcaaccaggtcaatatcggcatgcatgacgtcgtgaagctgatgcaggcctttacctcggtgaagcagggcgatgcgctgcactgagtctgccggacgccgcctctgaaaacgaggcggcgtttgccttcccccaccgatgcctgcgccgttgagctgcggttcaattttaccggtctatgctagacttgatgtgaacgaacgttcgttcattaatatcaatttatggcgccaggcgcccccttcaccgtttcgggaactgacgatgggaaaccgagaaaagattgtcgaggccgcgctgcacagctttacccatcagggatttcaccagaccagcatgcgggatatcgcgcaggcggcgggcgtcagcgtgggcaacctctataaccatttttccggcaaggaggcgctgatcggcgagatcgcgctgctggaaaacggcgtattcgccgagttcgccgccggattattggccgacagaaagcggccgaaacaggcgctgtcgatttttttcaccgcctatcatgcctttgtcgccgaaccggccaatgttcagctgtcggcggagatcgtggcggaggtggcgcgcaacccggcgttggccgagccgttcagcgccaaccagcggcagctgattgaggcgctggcgacggtgatcgccgaggctcagcaaaccggtgaaattgcggcggcgatagcgccgttaccgctcgcgcagctggtgctggacgtgatcgaaagccaggcctggcggcaggcgatctttgcgtcgcctgcaccggaggagaccacgccggtgcggctgttggaacaactgctctaccggcatccctagtcgaggtggatatgctgcacattgagccttatcgcgacgctgaccgcctgcaaacggcggcgctgatctacgccgcgttctgcgacaagttccagcgcgcgcgccgtttgagcgcccgccggcagtggcgtctgttttatcggctgtggagttggcagcaaagcggcagccgggagcgtagcttcgtagtgaaacaggatgagcaggtggtggcggcttttgccctcaatgcggccgaggcagagggcgacggcgggctgcgcccgcgcgccttgcctatttggcggctatgccgccgctacggttggctgaacgtttggcgcatgtatctgcaaattgtggtattgcagcatactccggcggccgatgagctgtatctttcctacctggcggtggcggaaaaccagcgcggcaaagggatgggcaggcggctgttgcagtggatgaacgactacgccgccgaacagggcgcaggccggcgcctgagcctgcacgtcagccggcgcaacgtcgatgcgcagcgcctgtaccggcgctgcggttttctggtacggcgcgaagagcactacgccttgctgggggtgctgttcggccaggccgattgggtattgatggagaaacgcaacggggaggcgatgtgcgcaaaatagggctgtgcctcgtggcgctggttttggcggcgcttggctgggtgatttacgtcaacgactttcgctttgtcaccgaaccggtcacggtgaccgccggcggcaaccggctgagcggcacgctggtgctgccggagcatgcgccggtcaaacccggcgtggtggtgttcatacacggcgatgggccggccaacgccagccgcgacgaaggctattacggcatttgggaggcgatagcgcagcagggctatgcggttttatccttcgacaagccgggcgtaggcggttccagcggcaactggctgcatcagaccatggcggatcgcgcgcgggaaaccgctgatatcatcgactgggccagacgggacgggcgcttcgatgcgcgctgcgtggggctgtggggcgctagccaggcgggatgggtgatgccggaggtggcgcgtttacggcctgacattgctttcactcttgcactctcgccggcgatcaactggctgcggcaagggcgctataacacccgggcggcgatggcggcggcaggggacgatgaagcgcagatcctggcgcgcgaggcgcattggcgccatatccagaccctgctcgagcaaccggacggctacgcgcagtaccgtcgcgagtctggcgccgccgcattgagcgccgaccgctggcgttttatccgcgccaacatggccagcgacgcgacggcgggattgcggcatttcgccacgccggtgcacctgatcctgggcgggcgcgacgtcaacgtggacgcggacgaaaccgagcgcgtgtatcggcaaacgatcccggcctcgctgctgacggtgacgcgtatcgccgaagcagaccacgtgatgatcaaaccgctgttcgcccgccatccgtggctgatcaacgtggttggcctgtttgctccgcgctcggtgcaatacgacacctaccggcgggacgtggcggccttcctggccgcccatccttgcggccaggggcgttagcctcagctcgcggcaggcggcggctcttcatgcggctgcggcgcgcgggagatctgcatcgcctgctgcggcatgccgatgccggcccgatcgaaatggattttcaccagccgatcgagggcgtattgcaccacccactgtttcagcgcctgtgtgcgcaccgtcacgcgggtggtgaacgagcggtctcccagcgccaccacgccgttgaagaccggctcgccaatcaggaaatgcttcacctgttcatcttgcttcagcgccgcgacggcctgatgcagcacctcattgacccgatcgatgtcctcgtcgcggctgacggtgtagttggcgcggtataccccgaactcacgcgcatagttggccagcgtggtgatcgaggagtacggcacgatgtggtagacgccgtagtcgtcgcgcaggccgatcgagcggatggtcatgcgctccacggtgccggtgatgccgctgacggtgacgtactcgccggtgttcatgccgttttcgaactggatgaacacgccggtaatcacgtctttcaccagcgtttgggcgccgaagctgatggccagccccagcgcgccggcgcccgccagcagcggcgcgatgttcaatcccacctgcgacagcacgatcatcacggtaatggtgctgataacgatagccagcacgttgcgaaacagcgtcagcagcgtgcgttcgcgcgcgctcggccgtacgccgttgctcagctccagcgccagacggtgctcgatgatgctggccatcagcgtccagctgaatacggcaatcaacaggatcagcaggatatgcaccagcccgccgagcgtccgctggccattttcgctgcccgcccactggtacaggttgatcaggtgccaggcatcgagcaggaacagcgtcaccgccagcaccaccatcacccgcagtatcttcagcccgttggggatgtaggagttgatgcgccgctcgagcatcgggtagcgcagattgacgtcggtcggcagtgaaatgcggcggaaaatccagcgggtcagcatgccggacagcagcgcgccgacgccgaccaccaacaggcttttcaccgtggcgctcatcataaagcgcaggctgttgccgatgtcgaactgggacagcacgaacaacaccagaaaataggcgatcgccaacagatgccagatatgccccagcccgcgcaggatcacgctgaaaaacgccatcgaccgctcggccagcaggttgatctgttgctgtatcggcttgcggttgtgcaggatcagccaaatggcgtacagcgtcagcgccagcatcaccaccaggttgacggtggcggcggccgggtagcttatctggaccgccaccaccggcaccaccaccatcaggccgtagccgatcaggccgctgagccaggcgaggcgcgtgttccagtagtgcgcgctccggtcgctgaaggggaaggggcgcagatagtcgaagcggggggcgaaaatcagccgcagcaccgccttgaaaaattcaatcaccgcgaaggcgctgagaaacagggtctgcagccgcagaatggtggcgctgtcggcgtggacgtggcgggcgaacagattgcccgccgccagcgccagcagcagcaccagcagatcgatggcgaaagcgccgagaatggcggcggggcgtttataccacgggccgcgctgtagccgcgcattgtgtccccaactgcccatgcgtttgtacagcggcgcgatcagccgccggatcaggtggaacagcgcaaaggtgaccgccaccgtcagcagaaagtagcccagcgcgcggaaaaagccggcgggattgaaaacgcgcttcgggccggagtcgatcagcttttgcagcgcgccgagcttttggttaaaggtgccgatgccttcctgcgccagcgagttcaggctgtcgctcagcgtagcgggcgtcgattcctccggcgttgccggcgcggcggcgggggcgtcgccggcggtctgtttcaggtggttgatgagttccgcgcgcgctttgtcgtcttgcagcagctcagccagcgcggcgtaggcggctttctgctgctcgctcttgtcggcgggcgcgggcggcgcattttgcgccagggccggtggtgcgaagacgttcagggtcagcaacagcagcaggaaaagcaggtgttctcgcagatgagaacctcgtcgggagtctgcgtttggcggcatggttcctctctttggcgttctgtgatcggcggatgtaaaagcaatacgatgaaaaacaatgaatatagtaggaaaggtggcgcgacggggcgtgggagagcgtgcggaatgaaagcggcgggcgcgtggggcgcccgccgttaaaccgccaggatcaggacacgtgctgcaggaactcctgcagacgcgggcttggcggatgattgatcagatcgtgcgggttgccgtcttcggcaatccggcccttgtcgataaagatcaggcgcgacgcaactttttcggcaaagccgacttcatgggtaacgatgaccatcgtcatgccttcctcggccagatcctgcatcaccttcagcacttcatggcgcagctccggatcgagcgcggaggtcggctcgtcgaacagcatcattttcggcttcaccgccagcgcgcgcgcgatcgccacgcgctgctgctggccgcccgacagttcggacgggtaatggtgggcgcgctccgccagaccgaccttggccagcagttcgcgcgccagcttttccgcatcggacttcttcgcgccgcgcacgcggatcgggccgaaggcgacgttttccagcgccgtcaggtgcgggaacagatagaactgctggaacaccatgccggcttcctggcggatcagccgatcgtccactttcggatcgttggctttcaggccgtcgacgatcagatcgccgctggtgacttcttccagcttgttgatgcagcgcagcagggtggatttgccggagccggacggcccgatgatcaccaccacttcgcctttgtcgatcttcaaatcgatgttgtgcagcacctgggtttggccaaaatgcttggagacgtttttaaattcaatcacaggattttcatccttctttccagacgacgcagcacgaagctcagcaccagggtaataatcagatagataaccgccacggcgctccagatttccagcgcgcggaagttaccggcaataatttcctgaccctgacgggtcagctccgccacgccgatcacgatgaacagcgaggtgtctttgatgctgatgatccactggttgcccagcggcggcagcatgcggcgcagcgccagcggcataatgacgtagcggatggtttcgcggcgcgacaggccgagcgccaggccggcctcgcggaaaccgttatggatagacagcaccgcgccgcgggtgatttccgcgatgtaggcgccggagttgatcatgatggtcaccaccgccgcggtgaaaggatcgatgcgcaaatcggtgaacgccatcggcaaggcgaagtagatgaacatcacctgcaccacgatcggcgtgccgcggatcacttcgataaacaccaacgcgatgtggttggcgatccaaccgccgtaggtgcgggcaaagccggcgacgaggccgatgatcaggccgccaatcagaccgaggaccgaaatccacagggtcattttggcgccctctaacaagataggaatggcgggccagatggcgctccagtcgaactgcatgatatttctcccggtgatcccaaacgtgggtatcagatacaacaaagcgcagggggttaagcgccccctgtgcttaagttaatcgcttgccaaattcacagcttacttaggttcggtgccgaaccacttcttgtaaatctcgttataggtgccgttctcgcgcagcgttttcaacgcgccgttcaccttctcgcgcagctcgtcgctgcctttagggaaggcgatgccatactgctgcgcttccagcgaatcgccgacggttttgaacttgccggcgccggccgtcttaatgaagtataggatgtttggcgtgtcgtgcagcaccgcgtcggcgcgcttggtgcccagttccatgtaggcgttgtcgatgttagggaactgacgcagatccttggttttgatgtgctgcttggcgtaatccaccgagccggtgccgctcttcaccgccaccactttgccgttcagatcgtcgatgcttttcacgctgttgttgtcggcgttgaccatcaccagcaggccgctcttgtagtagccgtcggagaaatcgatggctttcttgcgctcatcggtgatggtgatgccggccagcgccagatcgacgtttttggtctgcagcgccggaatgatgccgccgaagtccattggtttcagggtgtagtccagcttcagctctttggcgacggcggcccacaggtcgatgtcgaagccgacgtatttgtcgccttgcttgaactcaaaaggaacgaaagcggtgtcggtggcgaccaccagtttgtctgctgcgtgggaacttacggcaaaggccagggagagtgcggccagggagactttaaaaatcgacttcatgagaggaattcctgtacaggttgcggattacccattttttatattgcagttggtgccatgaaaaaatcgtgccatgttttcaactaatataaaaacaaagagttactgcgtgatgttgtgccgtgacggcgaatagttatggttatgcaccacaatgaggcaccgaaatggtgcgtaagaattatcttggtgcacggggctatcattaaccaaattttggctgtgaaacaaccgttctttaacgtttttgcttcaatattgataactaactctaactttcatgatccattgacggtgcaagggtgactgcgagaggggcaaaaagggagcagataatgctaacgcaactggctgtctttgctgccgcgccggttgtacaggctggtggccgcgtgttttttgtcttgttcggcctgacaggcgacgcaaaaacgcacgcccttcagcgccttgcggcgcgcctcggggatcggttctccgcattcctggcaatagcgttcgctctcgccgtgcccgagcgcttcacgcgcgcgctgcaccgcatcgtcgacggtggaatcaatctgatcttgtacggcgccgtccgccgcccagccgctggccatcatcacctcctgacaaggaaaccctaccgtttaatatgggccgttttttgtacaatgcaacggtcgcgcaaaagaaaacaggccgggcaaagcccagcctgcgctgcccggaacgacgggcgatctgcaacgctttcgcgttattcgatattggattcgatgaaccacaggaatttgtccagatcgcgcgaggcggcggtgaacatatcggcggtgtcttcgtcttccacttcggtaatggctttgcggatgtcattcgcgaccgcgccgtagcgatcggccagcgctttcaggtgctcttgcacgctgtggatattggtcgggtagcttttcagcggcgtgcgatcgttgaccacctgtacggtgcccagcgccacgcctcccagctgcaccacgcgctcggcgaaggtgtcctgatgctcgatgatggcggtgcggaagccgtccagcatttcatgcaccgcgatgaagttcgcgccgcgcatgttccagtgcgcctgtttggtgatcaacgaaagatcgatgaattgcacgacctgatggttcagcgccttgatggcggccagtttaactttttcgtccagatcgttacgggtatacagcagatcagaagatttcgttttcaccagtttagcggtactcatatcagatatcctcttgattagtcgttgtcctatttcgttacgggattaattatagcagggatgtttatttttgccgcacgaaaatggctattgcacaaataggggtggcctaatgacaatatttttatttggtttttgtctattgtgtaattttatgaattttattgttattttgttttttattattatttttgtcagtgacaatttatccccgttatcttattttctgcgggcgcgcaggtttggttaaatatccactttgttatcgtggtgttaatgccaagcctattcagattgatagacgtaattgatacggctaaagtatggaaattatccccagtctttattggcgagtgatgaaaattaacgtcgtcggcaccagcggcagcggtaaaagcaccctggcgcgtcaactggcggaacgtcttgacgttccctatatcgagatggacagactctattggcggcccgagtggcaggggacgcccgatggcgcgtttctggcgcggcttgagcagacgctggccgaagcgggaggaggctgggtgctggacggcaactacagccgcacgcaaccgatcaagtggcgcgaggtcgattatatcctgtggctggactacggtttctgccgcacgctgtggcaggccgcgcgccgcgcgtaccgccgcgcggccagcaaaagcgagctgtggccgggcaccggcaatcgggaaagtttccgccgttctttctttagccgcgagtcgatcgtgctgtggacgatccgcacttactcgaagaaccggcgaaaatacctggcggagatggcccgtaccgatatagggggccgtttcaagcgcttgcgctctccccgccaggccgccgattttctacggacgctgccgcaggctcacagcagcaggcggtgatggatcctcaccaccgctttcttgatgtgctgcggccgctgccacaggcagccggtcttatgcggttccatctggaaaaagatcgcgaacatgccgtgcgtcatgtgaagggtttgcgggtggcgtttgatgtccagcagcagcagatcgctattttctgcatgcggatgttcgcgatgcccgtcgcccgccaggccgtattcgatgcgttcttcgccgctgatcagcagatgcagcgcgatgtactcctgatgcatttcggcgcgcttctccgccgccggcgcggtggtcagcgtcatcacgtccataaagatgttgtcgccgtcgatcgggtgatggcccagcgccagttcgggcaggtcacatcggcgcaactcggtcagggttgaaaccagcgccggcgcgagtccgcggccgaagcgtgggttgaacaggctgttgtgaatcactgttattctccatgtgagcgaaagtccaaagagcctgcgatacaggctaaggggaagtatgccgatttgtcacgaggaaaacagttaacccgcctgcattccggcgttgcggacggcaggcgagtcaggcgatcaagaaaggctttcgaggcgcggtttggggcgaatggtcagggcggaacccatggaggcggcgataatcgccgccagcgccaaccattgcacgccgctcaggtgttcgccgaggaacagcatgccggacagcgccgccatcgccggctccaggctcattaaggtgccgaaagtgcgcgccggaattttgggcagcgcgatgatctccagcgaataaggcagcgcggtggagaggatcgccaccgccagcgccaccggcagaatatcgaggttgaacagcacgctgccggtttgccaggcgccgatcgggcagaacaccagcgcagcgatcaacgaaccgagcgccaccgtgccggggccgtgatcgccgccggccttttggccgaaaatgatatagaccgcccagcaggcgccggcgccgagcgcacaggcggcgccgaacggatcgatcccgcctacgccgtggccgagcggcaacaggaaccacaacccggcgatcgccagcgccacccagagaaagtcgatcggccgccgcgacgagaacatggccaccgccaacgggccggtaaactccagcgccacggcgatgccgagcggcacggtgcgcagcgaaaggtagaacaggtagttcatcgcgccgagcgacaggccgtaaatcagcagtggcaagcggctgccggcgacgatgcgcatacgccacgggcggaagataatgaacagaatcagggtgccgatgaaaagacgcagcgtcgtaatgccttccgcgcccacgatcgggaacaggcttttggccaacgaggcaccgctttggatagacaccatggcgatgattaacagacagatgggcagcagcgcggagggcgctctgccggaagtagataacgacatccttaacgggccttttttgcgccgttcctcagccttgagaaaacggtcgaaacggggatgcgagcagtgtaaatgaaatggcgaaaatctgtctgagaaaagcgcgcatcgcggtgaaatccgccgatcctcggatgagatgtggcggatttggtcaaaaagtgcgctttttcttaagaattatctggatattaaattggtgatttttgtcacagaaagccgtagaatacggccgaaaatagagcgaaaagaagcagatacactgttcttgaaatcttctgttacacgatataaagcattagacactcatttcaaggcagagtttcacgctaatttttgttatattttcaaagcatgaacaaatggatgtacttaataataaaacgcgtttgaggtggttatgaaaaaaattgcatgtctttccgcagtagcagcttgcgtattagcagttagcgcaggtaccgcattcgctggtcagagcaccgtatccgctggctatgcgcagggtgatctccaaggcgttgctaacaaggccaacggtttcaacctgaaataccgttacgagttcgacaacaacccactgggtgtgatcggctccttcacccacctggaaaaaaatcgttctgaaagcggtttctacaagaaatctcagtacgattccatcaccgcaggtccagcttaccgcttcaacgactgggcgagcatctacggtgtgatcggtgttggctacggcaaaaacatcgacaacgcccaggctggcggtaacaaaggtggcaacagcgactacggcttcacctacggtgcaggtctgcagttcaacccaatcgaaaacgttgccctggacgttggctacgagcagagccgcatccgcagcgtggacgttggcagctggaacgttggcgtaggctaccgcttctaagatttcttcatgcctgcgggcgtgaatgcgcggcacaggttgccgcgcggataaaaaatccgccttcgggcggattttttttatctgtcattagccgctgcgccccgtcggctgcgtcgaaaagcgcgcgctgcgggcatcgcgctcatagccttgcggttcggtcagtaaaccgtacagctcggggcggcgtccgtaaatccagcggcgtccggtactgagcgggatcagcgtcagatcgagatcggcactgaccagccggtcttccgccgcccaggtctccgctacgatgcggccgtagggatcgaggatcatcgcattgccggtgcgtacctcatcgtcatcgcggcccacgccgttgctgaataacaaaaacagcccgttgtcatgagcgcgcgagggcagccagcgcatcagccagccgcggccgtgttcgccgcgaaaggcggcttctatcgcctgcggatcttccgctcgccgctgccacagcgcctgtgggatcggcttcatgccgtgcgggctgcgcgaatgggtgccgccggtctggtgcggggccatcaacacctccgcgcccagcagcgccgtcgcgcgcacattctccaccagattgttgtcccaacagatcaatacgcccacgcgcacgccccagggagtgtcgaacaccgtatagcgatcgccgctggcgatagccgggtgttcgaaggcgtgcagtttacggtgcacatgcagcgcgccgtccggcaggcatacggcgtaggcgttgtagcaacggccgtcgtcgcccagttcgatcagcccgacgccgatcgccatattgtaacgctcagccagcgggcgaatgcgcgccagcgaagggctggacgcgatcggttccgccagcgcccgcacttcggcggcggacagatggcgcacgtgccaatagccggtgatacacatttccgggaaggccagcagctgtacctgctgctcggccgcctgagcgataaagcgctcgatagtcgacaggttgtaattcttatcgttggcgcgatgctggaattgcaccgtggcggcgcgtaatgagatggtcatggtgtctctccgattagggtctgcgttgattacagcaggtggtttgattactgtataatcaattaaattccctattcgataacctaatggaatggatataaaacaactgcgcgccctggtggcgctggctgaacagggcaactatcggcaggcggcgagccggctatgcatcagccaaccggcgctgagcaagcaaattcaggcgctggaaacccagctcggcgttcgagtgttcgagcgtggccgacagggggcggtgctcaccgccggcgggcagcggctctacccggaagcgcaggcgctggtggagcagtaccagcagtttcagcggcgcgcgcggcgggtggcgctcggggaagcggggcggctggcgctggggtttggcctttccagctttcatctggcgccgcagctggtggcagcctttcgccaacggtttcccgaggtggcgatcggcctggaggacttgccgtcggaacgccagtatcagctgttgctgcagggagagttgcaggcggggttcgtgcgcttgccggtcaatacgccgctgtgcggcgtggcattgctgagcgatcggttggtgctggccgcgccgggcgcgctggcgctgcgcgccgacgatctgatggcgcgtttcaatcagctgccgctgttgcagttgactcccaaacgcgggcgcgggctcagcgatcagtcgctgcggtttatcgccgcccaccggttgacgccgaacgtggtgcagcaggccggcgatatccagacgttgctggcgctggttgccgccggcgtcggtgtcgcgctgctgccgcacagcatcacgcatatcgcgccggccggcatcgacattttaccgctgagcggcgaggagacggagtggcagggcggtatcgcctgggatccgcagcgcgccgatgcgctgcgggacaacttcattcagacggcgttggcggcgcaacgcacttaggcattcaaagcgggcaatgcatcaccacgatcgggctctggtgatactcgctgcggtggctttcgctaaagccgacttttttcgccagcgccagcgaagcctggttttccggtgagatgatgcagacggtttgcttgccaggcaggtgcgttttaccccaggccagcgccgcccgcagcgcctcggtggcgtagcctttgccgtgcgccgagctcaccagcgtccagcccatttccggcgcgtcgagcgccggggtgatgtcgcgcaggaagttggagaagccgatgctgccgagatactcgccgctctgtttgtcacgcaccgcccaatacccgtatcccaacagcgcccagtggccgacgtagcgcatcaggcgcccccaggagtcttcccggtcgcgcggcgtgccgccgatatagcgcaccaccagcggatcggcccacagagcggccagcgagtcgaagtcgtccagcgtgtgcgcgtccagccgcaggcgttcggtgataagcgttggcgcggtgttgattacggtcatgttgctgctcctgcacagggtgaaaggcgatgaaaaacaacggcgttcagtatgccagagaaatcacaccgccagccacaacagccaggtgaacagaaagccgctcaggccgagcagggtggtcagcaccgtccaggtcttcaggccgtcggccaccgacagccccagatagcgcgtgacgatccaaaaaccggagtcgttgacgtgggaaagccccagcccgccaaaacaggtcgccagcgtcaccagcaccagctgcagctgattcaacccgctgaccgcttccgacaacaggccgccggtggtcaggatcgccacggtggcggaaccctgcgaagcgcgcagcgccagcgaaatgataaacgcggcgggcaccagcggcaggccgatggccgtcagcacttcggccagcgccttgccgacgccggattccaccagcaccttgccgaacacgccgcccgcgccggtcaccaggatcaccaccgcggcggttggcagcgcggcgcccatcacgtcaccggcgtgttgcaggctccagccgcggcgcagcgccaggaagtagaaggccagcagcagggctatcatcagcgccactgctggcgaccccagcaacgacagcgcatcgcgcagcgccgagcctgccggcaacagcgtggcggagacggtgccgagcatgatgatggcgatcgggatgacgatcagcgccgccaccaggccagcgccgggcgggttgatgcgatcgctgagcggcgctcgcccttccggccgcggctccggcgccgccagctgcagctgttccagcacctctatcgataacggataggttttgcggttgaggtagttggcggcgaaatagccgatcgcgccgaccggaatacagatcgcgaggccgatgatggtcagccaaccgatgtcggcgttgagcaggccggcggcggcgaccgggccggggtgcggcggcagcgcgacgtgtaccgttaacatcacgccggccatcggcaggccgaacttcagcggcgacactttggcgaccttggcgaagccgtaaataatcggcgccagaatgataaagccgacatcgaagaataccggaatgccgaggataaatgcggcgagggtcagcgcggcgacggtatgtttcggccccagcccctggctgaaacgttgcgccagcgactcggcgccgcccgagtgttcgatcatgcgcccgagcatcgcccccagaccgatgatgatggttaccgagccgagcacgccgcccatcccggcagtcatcactttcatcacttcaccggtcggaatgccgctggccaacgccaccagcagactgaccaccaacagcgcgacaaagggttgcaccttcgccttaatcaccatcaataacagcagcaccacgccgagtacggcaatcagcaacagcagagaggtagacatgaaaaaagcctttcgttgggtaagcgttgggcaccgcgatcgccgcgtggcgatacgggtgcgtttcattgttataaaatcgttttcctggtgtcggcgtgcgacgttagcggtaaggcttcagccagccgagcccggcggcggtgtcgccgcgcggccgatattcgcaaccgatccagccctgatagccgagcgcatccagcctgtcgaacagccatgggtaattcagttcgccctcgtccggttcgtgacgatccggcactgaggctatctggatatgcgcgtagcgcccggccagcgtctccagcagcccgctgatattgccgtccactaactgcgcgtggaaaaagtcgaactgaatgaacacgttcggtctctcgatcgccgtcaccacctccgccgcctgatgttgactggcgaacaggtagtcgggcttgaccggtgggctgagcgcttcgatcagcaccttgacgccgtgcggggcgaaggcgtcggcggcatagcgcgcattggcgataaaggtgtcgagataacgttgccgatccgcgcccgcgggcaccacgccggccatcaggtgcacgcagggacaggaaagggcgatggcgtaggccagcgcgcgatcgatatcagcgcgcgcatcttgctcgcggcccggcagcgccgccagcccccattcgccggcggcgacatcgccgggcgcggtattgaacagcacctgttgcaggccgtgttcgcgcagcttttcggccaacagctcggcgggatgctcgtaagggaacaggaattccaccgcgttgaagccttgttcggcagcggcagcgaagcgctctaggaacggcacttcgttaaacatcatcgataaattggcggcaaatttaggcatgggtcagctccgtaattcggcaatttcatcatcggtcaaatagcggataggacgatcgccgagggtgaagatcagccgcgccgcatcttccatctcttcggtattgtccgccgccgctcgcaggtctttaccggtcaccaccggcccgtggttggccagtaaaaaggcgcggtgggccggcgccaggcgcgccagatcctgcgccagcctttcgtcgccagggcgatagtagggcaccaccggcaccttgccgacgcgcatcaccacatagggggtgaacggtttgatggcgttgtcgacgtccagcccttgcaggcaagagagcgccgtgaggtaggtgcaatgcaggtgcaccactgctttgcattccggattgttcagatacagcgctcggtgaaagctgatctctttcgacggcttgtcgccggacagccaatcgccgttcaggctcactttagacaggcgatcggcctgcagctcgcccaggcaagagccggtcggcgtcgccagcagcgccccgtccggcagcaacagcgagaggttgccggcggaaccggtggcgtagccgcgttggaaaaatgaggcgccgaggcgcaccatctcttcacgcgcttgctgttcggtcgtcatgctcatactggaaactccgtttgcgcgcgtgagaagaaggcttcatcgccaaaattgcctgatttcagcgccagggaaatcgcccgatcgctggcgcgcacccagggaacgccgggagaaatgctggggccaatatggaagccgcgaatgcccagcgcctgcgtgaccacgccggaggtttcgccgccggcgacgataaagcggctgaatcccaactggcgcagttgcaccaccaattcggcgaacagcgcttccaccgcttcgctggcggcggcgccgtgctgccgttgcgtttgctgcagcgcttccggcggcgcagtggcgtagatcagcggggcaagcgcctccccggcgtgatgctgcgcccagtgcgccaactcggcggcgtaggcggcgcgtgcctgtggttcgaggcaacggccgatatcgatggcctgcgccgaagcgcgctcgcggtagtgcgccacctgccggttagtcatcacagaacacgagcccgacagcactgctgccttttccccctgcggcgcgccggctgcctctgccgcacgatcgccgctttgcgcccattgccgcgccaggccgatcgccaggcccgaaccgccggtcaccagcttcatcgttttcaacgcttcaccctgaatgagcagatgccgctcgttgagcgtatccagcaccgcgtagcgcacgccttcctgcgccagttggcgcagcttctcgctgaccgcctcggcgccgcgatccatttccgccgccgtcaccagcccgcaacgcccggcggcctgggattccatcaggcgcagcaggttgctgtcggtcatcggcgtgaccgggtgatgacgcatgccggactcagacagcagctgttccccgacgaacaggtggccctgatagaccgtgcggccgtttaccggcaacgccggtgagacaaccgtgaaattttcccccagcgcggtgagcagggcgtcggtcaccgggccgatattgccctgtgcggtgctgtcgaaagtggagcagtatttgaagtagaactggccgcagccctgtttttgcaaccaggccagcgcctgcaacgacagttcgaccgcctgttctgccaggcaggaacgcgatttcaggctgatgaccgccgcctgtgcgtttacctgcgtttcgtcctgcggcacgccgttcagctgcaccgtcggcaggccgttttgcaccagaaaactggcgatgtcggtcgcgccggtaaagtcatccgcgattacgccaagcagcatcagagcgcctcctttttctgcggtagatcgatgccggcaaagattttgattaccgcgctgtcatcttctttaccgtagccggcgttgctggcggcggtaaacatggtgaaggcggtggaggccagcggcagcgggaagtgcagcgccttggcggtatccgccaccagccccagatccttgacgaagatatccaccgccgatttgggcgtatagtcgccgtcgaccacgtggcgcatgcgattttcgaacatccaggagttgccggcggcgtgggtgaccacgtcgtacatcacgtccagcgggatgccggcgcgggcggccagcgccatggcttccgctccggcggcgatgtgcacgccggccaacagctggtggatgatttttaccgtcgcgcccagaccgatggtctcgccgatgcggtaaaccttgccggcgatggcgttcagcacgggttgcagacgctcgaaggtggcgtcggcgccggcggccatcaccgtcatctggccttcctccgccttggccgccccgccggaaaccggcgcgtccagcatcgccaggccgtagtccagcagccgttgctcgatctgtttggcgtcatcggcggaaatggtcgaagacaccatcaccgccgtgcccggcttgagctgtggcgccaggccttgctcgccgaacaggatttgcttcacctgcgcggcgttcaccaccagcagcagcacggcgtccagctcggcggcgaagtcgcgcgcgctggtagacgcttgttgcgcgccggcctgttgcagcgccgccagcgcctgcggattcaggtccgccccgtaggtggtcaatccggcgcggaggcatgaacgcgcggcgcccatgcccatcgcccccagcccgatgacgcaaacggcataattccctgggtgtgtcatactgcactcctgttaattttagtgataatttgttttgttgtgttaaatgtaagcgcttgtcggccgattatccgcgatcgttatcacaataattaacaatgtgtgaaacggatttttcgtctgatttctggcctgaatcaacattactattatgtttttaaataagtttatgtttacctggcctaactgcgtgcgccgtcacgccgcgaaaatttagggctatcggcgaacgaaaattgacgtaaaatcacaattattatcaccgcagcaacgagagggaaccgtgatacctgtagaacgccatcaacaaattcttgcgctggtatccgaacgcggcgtcgtcagcattgccgagctgaccgaacggctgggggtgtcgcacatgacgatccgccgtgatttgcaaaaactggaggaacagggcgcggtgcagtcggtctcgggcggcgtacaggcgcccgagcgggtggcgagcgaaccttcgcaccaggccaaagaggggatgttcagccggcagaaaatcgccattggccggctggcggcgcgacaaattcccgccaacagctgtatctatctggatgctggcaccaccacgctggcgctggcgaaacagatcggtgaacgtgacgatttgacggtggtgaccaacgactttgtcatcgccggcttcctgatcgaacacagccagtgccgaatcatccacaccggcggcaccgtgtgccgggaaaaccgctcctgcgtcggcgaagcggcggcgcaggcgctgcgcggtctgtttatcgatctggcgttcatctccgcctcttcgtggagcatgcgcggcctgtcgacgccgaacgaagataaggtgatggtgaagaaggccatcgtcgaggccagccgccgccgcattctgctcagcgatacgtccaaatacggcaaggtcgcgacctacctggcgctgccgatcgccgcctttgacgccgtcattaccgacgaggggttgcccgccgccgcgcgggaggccattgagcaagcggggattgcattgctgacggcgggagaagaggaataagaacgaagcggaatcaggatgaaagttcggtatcgatgccacgtgtgggcggttcactggcttcaacgccgccgcgttcacgccattcgcggcgcctttgttcagcccattcctcgtggaaggcttgcatctctttttggtgccgttccttcgtgctcataggggttgggtgggattctgccgttaacaggcgggatttcgatgacatataatccgtcctcaataagcgcttggttgtacaaataatgtacgtgatgcgcgtgttttttcaagagcgagtcataaattctggctaacgctggcctgagcggtacgctgaaaactaatcttgcttggtattgcgtcacaaaagtgacgatcgccaggccgatgccattaatgaagagttgttctcgttcataccgggtgtacgccatcctggtataggtatcaaataaggatctcgttacttcggcgcgattttccaatgctcttacatcgtacagttccatgacgtaagcattgtccaatacttccgaggcaggataagccccaataagccattgacgcatccttaacgtcgcttttttaaaatcaaggtaatacgcagcaacgctgctggcttttttataaaccgttattcgatacctatactccgtgacaggtcgtgcattgatctccctcacatcaatctccatgataaaatcctttttactattatttttcctatagttatcccctttgtgacaaacagattattaaccgcggcggagaggctcctccagccgccgatgaaggttgtgcgcagcgccgcgcaaaactaaatgccgctgaaccagttgtagccctgatcttcccagtagccgcccggattgacgtcactgacgaagatcgcggcgatatgtttggcgtttttgaaccccaacttggttggcacgcgcagccgcagcgggtagccatagtccgccggcagcgccttgccgccgaagtccagcgccaggatggtctgcgggtgcagcgcggtggccatgtcgaggctggagtagtaacgatcggcgcatttgaagccgacataaccggcattcagatccgcgccgacatgctgcagaaaggtgcgcagcggcacgccgccccattggccaatggcgctccacccctcaatgcagatcaggcgcgtgatttggctttgctgcggcagccgctgcagcttttccagcgtccagggcgcttttttctccactttccccgcgacctcaagccgatagccggcgagatcgatctcggggacgttgtattccgggtaaaatgcgttaaaggggaaagggtgggtgatctggtccggccggtaagtttgcgccaaccgctggccgctgaacagccaggcctgcacccggtcgttccagcgcgacatggcccacagcaccttatccacccgatcgccgtcttgcaggttgcaaccggtcagcatggcgatgccgcccagcgtcagcccggagcgcaacatcagccggcgctgcagattgaccagctgctttttttggtccggttccagcgtcggcgcggttgcccgctgttttttctcattcatgtttgccacccgttatcatcgcccacagggttttgggcacgacagccaccataaagacgtggatcaccacaaacaggccgatgccggccatggcgaagaaatgcacgtagcgcgcgaagtcgaagccgccaaacagcgcgaccaatccctgcagctgaaccggtttccaaatcgccaggccggacagcaccagtaatagccccagcgccagtacgccgaggtacatcagtttctgaatggcgttatagtggccatgccggtggcgcaggcgcagcgtcatagccagccagatatcctgccgcagcgcgtcggcgcgaagcggcaacagatcgcggcgaaaatgaccgctgaacaggctccacagcagatagcagacggcgttgagcgccaatagccacatcaccgccaaatgccaaccaatcgcgccgcccagccaaccgcccagcgtcatctgcggcggaaagcgaaaatcgaacagcggcgaggcgttgtagatttcccaaccgctcatgaacatgcacaccatggcgaacaggttgatccaatgagtgatgcgaaccggccagcgatgcaccggcggcgacgcgttggtcttcatggcattcctccggttacatcggcggcacggtgccgtctttgccggcggaaatgcgggtggcgacgcgctcgcccttttcgttggcggcggagaacagcacgatgtgcacgcccggtttcagcaggctcagatcgcccggatccagcgtcacgatcggcacgtcttccggcacgacgacggttttctgctggttgccgtaggtgacggtcaggatgcggccgttggatttcaccagtttgccgacggtgccgttggtcatggtgtccactttgccgtcggcggattcccaggccgagtgcccttcgccggtgccgcgcaggctggcggcgaacacatgcacctccaacgccttgagcgtgccgtccggctgcggcacggcggcggtgccgatgaagctgtccggtttgatatcgtccagcgtggctttggaaacgctgagcactttggtctgatcgttcagcttgacgctgagggtctcgcccttgcgatcggtcagctgcaaattgccgtcggcaacctggctgatggtgccgcgcagcggcgcaatcaccttgcccggcggttgggcggcggcggccaagccgctggacagcagcaaggtggataacagtaaaccggctatacgatgacgggtaatcataacgttctcctgaaatgagtttgccggttaagcatggttgagccattgggtcagcgccatggccgtttgatgacattaatgtcatcaagtttgtccgccgaagctgctagtatttttgcagacgtaacgaggtggcgagcatgcgaatactggtagttgaagacgatatcggcacaggggattacctgaagaaagggctgggggaagcgggctacggcgtcgatttggcgcgcaccggcaccgacgggctgtttcgcgcgttggagcaggactacgatgcgatcgtgctcgacgtgatgctgccggggctggacggctggcagatcatcgaggtgttgcgcaagaaaagcgacgtgccgatcctgtttctcaccgcccgcgacggcgtacaggatcgcatccacggtctggagctgggcgcggacgactatcttatcaaacccttttcctttaccgagctggtgctgcgtttgcgcaccttgctgcgccgcgggccggcgcgcgaagccgatcattacgccatcgccgatctgcagttggacgtgctgcgccgccgggcggtgcgccaggatcaggtgatcccgttgaccaacaaggagttcatgctgctgcatctgctggtgcggcgcgaaggcgaagtgctgtcgcgcacgcagatcgcctcccaggtgtgggacatgaatttcgacagcgacactaatgtggttgatgtggcgatcaaacgcctgcgcgccaaaatcgaccggccgttcgacgtcaagctgatccacagcgtgcgcggcatcggctatgtttgcgagccgcgcccgtgaacgcccgcgcttcacgtcggccggtgtcgctgacgctgcgcaccgccatgctgttcgcgctggtggccgcctgcgtggtgagcggggcgggctggtatctgttcggcgccatgcgtcaggaaatgacgctccgcagcgatctgcaggtgaccgggcgcgtagagtatttccgccatttattggggcagcgctttcctttggcgcgcctgacggctaataacggcctgttcgaaaatatgctgggcaatgaacaggatgtgttgattttccaaatgccggggcaaaaaccgctcatcaatgtgaatccggccagggtggccctgccgccgatcgcgccgacgccgcccgaacaggcgcagacgctggccgccgtgcgcggcggggaaacggcgcagggtgtgccgctgcgcgcggcgtcggcaatggtgcgcctggaagacggcagtttgctgcagatttccgccgcgcacgtgatggtcaacgaacagaaaatgctggcgcgttacctgtggcgcattgtcgcggcggtcattgtggctttcctgctgattgcgctgctgggctatggggtcatgcgccggggattgaagccgctatggcgcatggcggcgcaggcgtcgcagatcgcgcccaatacattgtcgacgcgcctcagcgaacagggggcgccgaaggaattgcagcagctgacccgttcgttcaatgcgatgctcgatcggttgaatgaaggctatcagcggctgacgcagttttccgccgatctggcccatgagatccgcaccccggtgggcgcgttgatgggccagtgtcaggtggcgttgtatcagccccgcagcgtggaggagtacgaaaccctactgtcgaacaatatggatgagctggagcgtatttcgcgcatggtggaaaacatcttgtttctggcgcgcgccggtgaggcgcagtccgcgctgaactacagtcgtctggatgtggcggccgagctgcggcgggtggcggattacttcgaagggctggcggaagaacgcggcatcgcgctgagctgcgaaggggaaggcgagctgaaggcggacgcgatgttgttccagcgggcgctgagcaatctggtggccaacgcggtgcgctatgccgatgaaaacagcctgatcgtattgcgggctgaacggcgcgccgatgcctggtgggtgcaggtcatcaatcaggggccgccgatcgcgccggcacagctggaaaaactgttcgatcgtttctaccgcgccgatcccgcgcgcagcgccggcagccatgccagcggtctcgggctgtctatcgtacgcgccatcatgacgctgcacggcggtgaggcgcgcgccgaatgtaccgggcgcgcgtctgccgccagcctcattttcagcctgcggttcccgttagcgcaataaccgttaagccggattaacgcggcggaatggcaaagcggaagcaggcgccgctttgcggttgttcgatcagctgaatatcgctgtcgtgcagctgcagaatgcgccgcacgatcattaaccccagcccgcccgcagggcgccgggcgccgctcaggacagacggccgcacgaacagatcggcgcgcagcgtctgcggaatgccggggccgctgtcgctgacctgcaccatcacccgatcttcctgccgccacagccgcacgccgatgtcgccgccgggcggcgtatggcgaatggcgttgtccagcaggttggtcagcacccgctcaatcatgctgagatcggcgaacaccggcggcacgccgggggcgatgtcggcatgcagccgctgattacgcgcctccgccgccagctcgaacttttggaacacgtcctgcaacagctcgctgagggagaagggctctttctgcggtttcaccacgccgtactccagccgcgccagctcgaacagctcctgcgccagcttgcccactttgcggctctgcgccagggcgatctccagatagcgccgccgatcggcgtcgctcagggtggcggccttgaccgacagcgtttccagatagccgtgcagcgaggtgagcggggtgcgcagatcgtgcgagacgttggcgatgaattcgcgccgcagccgatcctgctgcgccagcgtttgccactgttcggcgaggcgctgcgccatgcggtgaaaggcctgttgcagctggctgacctcgtcgcgcccggccggcgccgccggccgcgccgcgtaggcctgcaccgcctcgatgccgccgctgtccagcgcattgacctgacgggtcaggcgccggatggggcgagtgacccagtagaacgcgaaaccgccggccagcaggctgaacagcaccatcaccccggaggtccacagcgccatcctggccgccgagttgaactgggcgttgctggccagcgccgtgtactcttcaccgagcaagaccacatacagatagccctcgacccggccgtcgaccttcagcggcgcaacgctgaacaccttgcgcccgtccgcgctgcgcggatcgtcgccgtacaccggcatctgcgcaccatcgagcagcgcctgcagcggcgccagcgcgacccgctgccgcttcagatgcccggccggcgcggcgttgccgataatcgtgccctgtttgtcgagcaggtaaacctcaacgctgggattcaccgccatcagttggtcgaacagggtatgcaccgcctgcggctccggcccgttcacccccagcagcggattgctgtcggcgatatgctgcgccaggttgccggacaggcgctggatcaccgcctggctgtactgagtattgctgcgcacctgcatccaaccggaaaaggcgcagccgatgacgatcagcagcgcgaagataatcgtgaggcgttgcgctaacgtaaggtttttcatggctcactcttgcggcgcggccgcgaatttatagcccatgccccacaccgtgaggatgcgctcgggttccgccggattgcgctcaatcttgatgcgcagccggttgatatgggtgttgacggtgtgctcatacccttcgtgctgatagccccagacctgattcaacaggctgaggcgcgagaatacctggcccgggtggcgggcgaaaaagtacagcaggtcgaattcgcgcggcgtcagctcgatcggctgttggtgcaggcgcacctcgcgggcgataggatcgatggtcagatcgttgaagctgagcgcgccggcgtccaggcgcaggttgcggctcatcgcctcctggcggcgaaacagcgccttgacccgcgccaccagctccagcatggaaaaaggtttggccagatagtcgtcagcgcccagctccagccccagcacgcggtgcacctcgctggagcgcgcgctggtgatgatgatcggcgtgtagcgcgtcatggtgcgcgcccggcggcaaatctccaatccgtcgacgcccggcaacatcagatcgaggatgagggcgtcccagccgccctgttccagcatcgccatgccctgattgccgtcggcggcgtggctgatggcgtaaccctcgtcacgcagatgcagctgcagcagatcggcgatgtcgccgtcgtcctcgacgatcaaaattcgttttggcttgtccattctcattaccgctgattgcccgattctctctgaagtctacacaaccgccaccggcggagttatcacattttatttaactttgcgtgaggtcttggggaacaaatccggggaatactgggctcatcgcatcgttagctggcaggaatcgctatgagcttcaccctcaccccggaacaacgacagacggtacatcctctctggctgcggttgacgcattggctgaatgcgctggcgatgctgatcatggtcaccagcggctggcgcatctataacgcctcgccgctgttcaacttcagctttttcaacgagctgacgctcggcggctggctgggcggcgcgctgcagtggcacttcgccggcatgtggctgtttggcgtcaacgggctgtgctacctgctgcttaacctcgccagcgggcgtttcaaacgcaaatattggccgctcagcccgaagcagtttctcgccgatgtcggcgcggcgctgcgcggccggctgcagcacgccgacctgcgccactacaacatggtgcagcgcgtggcctatctgtcggtgatgctccttggcgtgctgagtgtgctgtccggactggtgctgtggaaatcggtgcagtttccactgctgcgcacgctgctcggcggctatgaagcggcgcgctatatccattttttcgccatgtcggcgctggtggccttcgtcgcgatccatctggtgatggtggcgctggtgccccgcacgctgctggccatgctgcgcggacgttaaggagttcacgatgaaaaaggataaaccgatcatgacgatcgttgaagggcaggcgatcgtcaaagaagcgcagcgcttgttgaccgcgtcgtcccgccgccgctttctgcgcaacggcctgacgctgggcggcatcgccatgctcaccggctgcgatctcagcggcaacgctaacgtcgagcaggcgctgagccgcatttcgcgtctcaacgatcgggtgcagggctggctgttcaacggcgatcgcctggcgccggtctacccggaatcgatgatcacccggccattcccgttcaacgccttttacgccgaggaggacgcgcccgacatcaacggcgacgactatcggctggaggtggcggggctggtgcaggacaagcgcgcctggagcctgccgcagctgcatcggatggcgcaggtcagccaggtgacgcgtcatatttgcgtcgagggttggagcgccatcggcaagtggggcggcgtgccgttcgccacctttcttaaggtaatcggcgcggatctgagcgcccgctacgtcagcttcaaatgcgccgacgactactacaccagcatcgatatggccaccgcgctgcatccgcagacgattatcgcgctgacctacgacggccagatcttgccgcgcaagtacggctacccgatgaagctgcgcatgccgaccaagctgggctacaagaatccgaaacacattcaggtgatcgaggtcaccaaccgcttcccgggcggttactgggaagaccagggctacaactggtttggcggcagctgaggcggccgccggccattctccggcactccggtgcctttgacatgacggaaggaaataccatgaaaaagttattcgcaatgatgatgtgcagcgcgctgatgctgggcgtggccggcgccaacgccgcggacggcatgagtaaagacgcgatgaaaaaggacggcatgagccagatgtcgcacgacggcatggcgaaagatgggatgaagaaagagtgcatgggcaaggactgcatgaagaaagacaaaatgggcaaagacgccatgaaaaaggatggcatggcgaaagacagtatggccaaagacggcatgaagaaagacgagatgaaaaaggatgcgatggggcactaagccgcctcaccccgcggccgcaagcggcaaaccgcggcggctgcgggcagcataaggagagaggatgatgttggcgacatggctgcggcgctttcagcgctcgaacggggacgttatctttatgcgcgcggcgttggtggtgattttcgccgccttcggctacgccaaatggtttgattacgaggcgcaggggctggtgccgctgatcggcaacagcccgctgctgagctggatgcatcaggcgttcggcattcgcggcgccagttatgcattaggcgtcgctgaatggagcttcggtttgctgctgctggcgggattctggtcgcggcggttggggttgctgggggcgatcggatcgacggtgacctacctgatcacgctgacgctgatcttttccacgccgggcgcctgggagccctccgccggcggttttcccgccatggccggggccaccagctttttaatcaaggatctggtgttgctggccggctccctggtgctgctgaaagccgacttgccggccgcgcagtgaccaatactaatatggttgacacaatttagccctaaaaagcccgatgtactcatcgggcttttacattttagcgacagaatggttactgcatgtttgtattttaaccaatccctttttttattaataatatagttgtgatgcaaggagttcagtatctggctgtccggatatttttattaatgcatctgagttatcaaatattttgttattattaagatccaccacgatatacgtatcttttttcaaattactgtccagagtggaaacgacaccagccttccctttaaattgcaatgggttttctgggtctgaaatgaactctatatatccatagttgtccaagctactccctccactaacgttatctacgaaaggtattttctcccctttttttcttcctgaaatataaaaattatcatcactgagagcgataatatcttctcgtgcattaaaatcataaagagtactggtgtttttagcgattgacataatattaaacatgtccgccccttttcctccaatggctgttacgatatcactcacgtcaaaataatcgtccccatcgccgccgatgagttttatagtgcttgatacctctcggtatattgaattcgagagtgcaaatttattgccttgcgaaccgccaaaaatgacgatgttcttacttattgttgtaaataaatcaggttcaatcgaaagatctacaccagagttttttgaagcatcaatagtaaattcagtagtattgttatctcctccaagaatagcattcaattttattttgtgtgtgccttcaatagttattttttcaacatgtgacttggttaattttaacgtcaaaccatttttgtcatttgattcccctacggtttttatattaacattcctcaggttttcccctattaactcaaatgctcctgcataaataacgcttttagtgccagatgattctaccgatttggttaatgtgtcttcaccatttttttgattggtaaggaagtttaattctgttacatcattcttaaatttcagtgagtaatttacattactcacagagtaaggtccgtcactgcggtttccaatataaaaatttgccgcctctttaggtatgttgatgacggaaactatatctgcagtggcaggttttgattgattcgctgtgtttataaatgagaaccctgctttgccaatttgattaatattccctccactaatgatgttggtgttttcaataaatatatcataatctaaagtgttgctgattactgatgatgttctggatatagtaccatctacattttttgtataagttaatgttgatatttgacctgtgtatttatataagtcgataagcgagaagtttttaaactggtcgagattgcttgtatattggatgctctttgtgtctggagcaccattaatacctttggtgattgttatttcagaacgagtattgataaagttcgcagatattgagttgactccgttaccgccatctgccgtaaacaaagtatttattttatttccggatttgttactattatttcctgtccatccaagaaaatcgttaccgataccaaaattaaaatgagttggcgctgtggtgatatcagctgactgtgttaacattaataatgtgtttgcttttttagacgttaactctgaaatgcttccgttcatataagcgaaaatgaaatcattaacactattatcgggcaaagctattttcacaggttggtttccgctaatgcttatttgcttaatgtttgctgcctgattaaggttaatattgctttttgttgcaagattgatatctattttttctaattttgacatttctattttactgatattatgtagcaacccagaattaacactactagaaagatagttatctgaattgtttgtcaatgttgcataggttttataattcaggctgtctgcaactctaaatatgaattggaacttctcatgaaattcatttgttgtgcccgcggttgtatttagtgcgctgtttattacacttttaattatctcacctttatcggatagggtaacaagttgctgtattgtggcgctatctgcatcatgcccataaacaaaattatacactttttgcgcgtatgcggtaatttctaaatatgttgatatgcgagtgaactcagaagtattgagtaaaatatctaccattttgtcgtagccggtacctgaggccattttttggctccagccaaatagtgcttcagaatttagatttcttcccgcgccagctaaataaagttcggcgataaactcctgatactctaaaggaggcagttctcctgctttataaacatatgaagcgccttttaaatgttcccttgcaacgtgatcttgttcattgttactttcttttaatgtattcattaattttattgcaatctctccacgagatattcccgttgataatagattgacataaaagttcaattcattatcagatgctgaacgctcataaccattctcgaataacttttgtataaatgtcttattagttactttacttagatatggacgatcattaataaatttttctgtggcttgaagtaatgttctttcatggttattgattaatggagcccaatactcaatcacatcacgggtgattcctgcccctaagatatgaaaaacgccttgaatatcagctgtgctatcagtttcattcgttgatgatggggagggagagccaggataaagagcctgatttccgttgtctacaaaatgctccctatctatctgacgttgtaccgggtaattatattcataactattatttatactccagtcgtcgttcaattgaggccatggtgccgtattagttacaagttccttagtaattttgaagagattattattgagattagggttgatatatgactcgtttgaccagagcttaaactctatttctcccatggttctaccgtgaatggtgttaaaaaagaaaaacatgatctcaaagttattatgatatccaccatatatttcttttgcttcaggcgtcttcattagccttgtgattaaatcctctaaacccgcaggtccatttttctgtaaattttcactaagtgattttaaatctttttcaggtgggcttttccgagtgattgcataataaatgctggcaatctgtttttcgtattttatctcagccataatttaattcctcattgtgataatgttttttactaatgacttgcagttctcttttaaaggctaagtaattataggaaagaattgaaagtctggctgaggaaatttctgatattggatgcatggtcatcattttatcgatgctggtaaggtataaatgatgttttttgtttatgtaaaataaagtaactatttgtagtttatagggttttaattgtcttggagtgtcttttaatcttcaaaaaagatacttatgatgttttttgatgaggtttagaataaatatgtattgaattttttggggggatattcccaccaactaataggctggtgggaatggcattattttaatcaggataggtcagggtgccccccggcgcttcgcgatgaatgtgcaggaagttcaggtgcttctcgtactggtcgaggatatcgccaatcacctgttccttgctgtagtccatcaggtcgttgccctgggtgccttccatcaggaaggtttccagccggtagtagtgcgacttgccggagcgggcgcggtaggtgaagcccggcaccgagtagcgcatcggccagatctgatagatgaagttctgttcctcgcccaggtgtaccagcagctccaggtggttcaggcgttcgtcttcggtcggcggcacttcgctgaactccactttcgcgccgcgcaactccagctcgcgcgccacgtcctgcatcgccgggcggcaaaccttatccaacattttctgcgtgtactgcgtgcccgggtagttcatcacccgcgacaggcgctgtttccagttgagcacgtcgtggctggagaccggcaccggcgccagggtgctgagcgcgctggccttgcggtagtcttctacccgcagcgatttatacagcccggccatcacgaagaagatcacgaagctgaacggcaggcccatgatcaccgtggttttctgcagcgccggcacgccgtcggtcatcagcatgccgatggtcagcaggccgatggccaccgaccagaaaatccgcagccagttcggcgcatcattattgatgtcggccaggcgcgaggtgaagttacccagcaccagcgagccggagtccgccgaggtgacgtagaacagcaggccggtgatggtggccaccgaggcgctgaaggtgaagccggggtattgcgccagcaggctgtagaagccgcgctccgggaactgcatcacttcctgagcaaactcggcgttgccgtgaatgatctgatacagcgcgctgttgccgaagatagacagccacagcagggtgaacacgaacggtatgatcagcgtgccgaccacgaactgacgaatggtgcgcccgcgcgagatgcgcgccaggaacaggccgacgaacggcgaccaagccacccaccaggcccagaagaacagcgtccagttgttcatccactccaccggccgatcgaaggcgaagctgttgagcgtcatgcccataaagcggttgacgtaatcgccgacgttaagcaccagcgcgttgagcaggaactcggtgtcgccgaagaacagcacgaacaggatcaggcccagcgccagcagcacgttcagctcggacaggatgcggatgcccttgttgacccccgaggtgaccgagatggtggccatgatcaccgacagcaggatcagcgagccctgcaccgtcaggttttccgggatctcgaacagcaccttgaggccgtagttgagctgcaccacgccgatgcccagcgtggtggcgatgccgaagatggtgccgagcaccgcggcgatgtccacgctgtggccgatcgggccgttgatgcgtttaccgaagattgggtacagcgccgagcggatggtcagcggcagattgtagcgatagctgaagtagccgagggcgatgcccatcagcgcatacattgaccagccggtcaggccgtagtggaacagcgtccagaccattgcctggcgcgcggcctccagcgtttgcgcgtcgccttccggcggcatcatgtactgggtcaccggctcggcgaccgaaaagaacatcaggtcgatgccgatgccggcggcgaacagcatcgccgcccagctcatcaggctgaactccggcttggactgctctggcccgagcttgatggaaccgaagcgcgaggcggcgataaacaccacgaacacgatgtacagcgtcgccgccagcaggtagtaccaaccgaaggtggtcgacacccaattcagcgtgcgggtgatccactgcccggagaagtcggtgaaaaagatggtcattagcgagaaggccaggatcagccccgccgaggtgaagaaaaccacagggttgaggcggtcctgctgcggtttggaggaggtttcgcgtgttgtcatcgtcatcctctgaactgagtaaaatcgtgccgctccgcatttcggggcgcgttggcgccgccgaaaaacgggcgaatgaaggcggcgaccatccccatggggatggcctgagtaacgccgctttcgcctgttgccgaagcaccggagcgcttcgcggtgggaaccgcttacagccactgattttggtcagattcgttaattacctcacaaaaatcagccagttccacaaccagatagtacaaatttttaaccaggcggcaataaaatatatgcaatttttattgaacgttcaatcaaaaaaaagtttaatagtccgcatgatgacctgaatcacgggcgaaacggcagtgaaatttgcccgctgagataaggccgaagtcggttttgtgagagtcgaaatatgccaaaggtaggaatgcagccaatcagaaggcagcagttgattgatgccacgctcgccgcggtaaacgaagtgggaatgcatgacgccaccatcgcgcagatcgcgcggcgggccggcgtttccaacggcatcatcagccattatttcaaggataagaacggcctgctggaagccacgatgcgctatctgatcagccatctgggcgaggcggtgaagctgcggttgcaggcgctgaccgacaacagcccggcggcgcggctgcaggcgatcgtcgccggcaacttcgacgacagccagatcaacagcgcggcgatgaagacctggctggccttttgggccagcagcctgcaccagccgcagctcaaccggctgcaacaggtgaacggccgccggctttattccaacctgtgcgccgagtttcgccgcgttatgccgcagccgcaggcgcggttggcggccaaggggctggcggcgctgatcgatgggctgtggctgcgcagcgcgctgcgcggctccgcgttcaatcaggcgcaggcgctggcgctcacgaccgaatacatcacgttccaactccgggggcaaacgccgcccggaggataactcaaggagatcctatgtcccgttttggcttgcagaagctctatattcatggcgcctatgtagacagcaccgctggaaaaaccttcaacgccattaacccggcgaacggcgaagttctggctgaagtccagtccgccggcgctgaagacgtcgatcgtgcggtggccagcgcggccagcgggcagaaggtgtgggcggcgatgacggcgatggcgcgttcgcgcatcctgcgtcgcgcggtggatattctgcgcgagcgcaacgatgagctggcggcgctggaaacgctggataccggcaaagcgatgtcggaaaccaccgcggtggacatcgtcaccggcgccgacgtgctggagtattacgccggcctgatcccggccattgaaggcgaacagatcccgctgcgcgatacctcgttcgtctacacccgccgcgaaccgctgggcgtggtggccggcatcggcgcctggaactacccgattcagatcgcgctgtggaagtccgcgccggcgctggcggcgggcaatgcgatgattttcaaaccgagcgaagtcacgtcgcttacggcgctgaagctggcggaaatctacaccgaagccggcctgccggacggcgtgttcaacgtggtgaccggcagcggtgcggaggtggggcagtacctgaccgaccatccgggcatcgccaaagtctctttcaccggcggggtgaaaaccggcaagaaggtgatggccaacgcatcgggttcgacgctgaaagaagtcaccatggaactgggcggcaagtcgccgctgattatctttgacgatgccgatctggatcgcgccgccgatatcgccatgatggccaacttctacagttccggccaggtgtgcaccaacggcacccgcgtctttgtgccggcggcgctgcaggcgcagtttgaggcgaaaattctcgagcgcgtgaagcgcattcgcctcggcgatccgaccgatccgcaaaccaacttcgggccgctggtcagctttgcgcacatggaatcggtgctgcgctttatcgagagcggcaaaaacagcggcgcgcgcctgctgtgcggtggcgaacgcgtcacccacggcgaattcggcaagggcgcttacgtggcgccgacggtattcagcgactgccgcgacgacatggaaatcgtgcgcgaagagatcttcgggccggtgatgagcattctcagctaccagagcgaagaggaagtggtgcgccgtgccaacgacaccaccttcggcctggccgcgggcgtggtgacccacgatctggcccgcgcgcaccgcgtgatccaccagctggaagccggcatttgctggatcaacacctggggcgagtcggcggcggaaatgccggtcggtggttacaagcagtccggcgtcggccgcgaaaacggcctgaccacgctggagcactacacccagatcaaatcggtgcaggttgagctgggcgattacgcctcggtattttaactatccccgtcgtctttcgagccgcagccgggttggctgcggccgacactccccgagagccaaatacaccgcctgttgcggatccgcgtttcgcgttttcgtctcatgcagaccaataaagtaaggagataatgaatggaatttgactacatcattatcggtgccggttccgccggcaacgtgttagccacccgattgaccgaagacgccgacgtcagcgtcctgctgctggaagccggcggcccggattaccggatggatttccgtacccagatgccggccgcgctggcgtttccgctgcagggccgccgctataactgggcgtatgaaaccgatcctgagccgcacatgaacaaccgccggatggaatgcggccgtggcaaagggctgggcggttcatccctgatcaacggcatgtgttacattcgcggcaacgcgatggatttcgacaactgggccaaggcgccgggtctggaagactggacctatctggactgcctgccgtatttccgtaaggcggaaacgcgcgatatcggcccgaacgattaccacggtggtgagggcccggtgagcgtcaccacgccgaaggccggtaacaacgaactgttccacgccatggtggaagccggcgtgcaggcgggttacccgcgcactgacgatctgaacggttaccaacaagaaggcttcggcccgatggatcgcaccgtgacgccgaagggacgccgcgccagcaccgcccgcggttatctggatcaggcgcgttctcggccgaacctgaagatcgtcacccatgcgctgaccgaccatatcgtgttcgacggcaagcgcgcagtgggcgtcaactatctgcagggcgacagcaatcagctgacccatgccaaagcgcgccgcgaagtgctgctgtgcgccggcgccatcgcctcgccgcaaattctgcagcgttcgggcgtcggcccggcggcgctgctgaaaagtctggacatcaacgtggtgcacgatctgccgggggtgggggaaaacctgcaggaccatctggagatgtatctgcagtacgcctgtaagaaaccggtgtcgctgtacccggcgttgcaatggttcaatcagccgaaaatcggcgcggaatggctgttcaacggcaccggcgtcggcgccagcaaccagttcgaggccggcggtttcatccgcagccgcgcagagttcgcctggccgaacattcagtatcacttcctgccggtggcgattaactataacggcagcaacgcggtgaaagagcatggcttccaggcccacgtcggttcgatgcgttcgccgagccgcggccgggtgcaggtgaaatcgaaagatccgcgtcagcatccgagcattctgttcaactacatgtcgaccgaacaggattggcaggagttccgcgacgctatccgcatcacgcgcgaaatcatggcgcagcctgccctggacgaataccgcggccgcgagatcagcccagggccggaggtgcagaccgacgagcagctggacgccttcgtgcgcgagcacgccgaaaccgccttccacccgtcctgctcgtgcaagatgggcgaagacgagatggcggtggtcgacggccagggccgggtgcacggcatggaaggattgcgggtggtggatgcgtcaatcatgccgctgatcattaccggcaacctgaacgccaccaccatcatgatcgccgaaaagatcgccgaccgcattcgccagcgcgcgccgctgccgcgcagcaccgccgactactacgtcgccggcgatgcgccggtgcgcaagcagtaaccgacacgccctctcgccgttgagggggagggccgccgtagcaagcaacccctctccatatgctcttccccaaggcgagggggcaactctcttttatcccttatcccatcatgccgccggcagcgagatcgcctgatcgaaactggtgggcgtcgccatgcgccacatgcgggcgtagaactcgcttttgatctccggctgcagcagcgcgcccggctccagatagtaatagatatcggcgtacaccttgatctcggtcggcgtgatgcggcgcagcatatggtgcgaggtcagctgctccgggcggctgacgccggccgccgccagcatgtctgccagcgctttcaccgtattctgatggaagtggtagacgcgttccgccttgttcggtaccaccagcgccttttgccgcagcggatcttgcgtcgctacgccggtcgggcagtggttggtgtggcagctttgcgactggatgcagccgacggcgaacataaagccgcgcgccgaattcacccagtcggcgccgagcaccagcacgctggcgatgtcaaaggcgctgatgatcttgccgctggcgccaatcttgatttggtcgcgcaggccgcagcccaccagcgtgttatgcacgaacagcagcccttcgcgcagcggcatgcccatatagttggagagttcgagcggcgcggcgccggtgccgccctccttgccgtccaccacgatgaagtccggcagaatgcgggtgtgcagcatcgccttgacgatggcgacgaactcccacgggtggccgatgcacagcttgaaaccgaccggtttgccgcctgacagctcgcgcagctgttggatgaactgcatcatttccagcggggtggtgaaggcgctgtgcgaggccggcgagatgcaatccacgccttccggcacgccgcgggtggcggcgatttccgcatctaccttcttcgccggcagaatgccgccgtggcccggcttggcgccctggctgagcttgatttcaatcattttcacctgcgggctttgcgcctgttcggcaaagcggcgcggatcgaaatggccgtcggcggtgcgacagccgaaatagccgctgcccagctcccacaccaggtcgccgttgttttcgcggtgatagcggctgatgctgccctcaccggtgtcgtggtagaagttacccttggccgcgccgaggttgagcgcgcggatggcgttggcggagagtgcgccgaagctcatggccgaaatgttgaagatcgacgcggagtagggctggcggcagtcggcgccgccgatggtgatgcggaaactggttgggtcggcggcttccaccggccgcatggagtggccgatgcactcatagccggtttgatacacgtccagcagggtgccgaacggtttgtcacccatctcgtttttcgcccggcgatacaccagcgtgcgctgggtgcgcgaaaacgggatctcttcattatcctgctcgaggaaatactggcgcagttccggacggatgaactcgaagaagaagcgcaggcggccgatgatcgggtagttgcggcagatggcgtggcgctgctgcgtgagatcgtagatacccagcaccatcaggcaaccgcaggccagggccggcagccagaaccagggatggttgtgcatcatgatcaagaaaaccagggtgagcaagatgctcagcacaaagcaggtatagcggctgaataaggacgacttcataacatctcctgatgtttattttaatccacacgacatgactcacggataatccgtgtgcaaatcgtaaccaacaggagaggatgttgtgtgtctgttgctgctttgtcgccggttgttacattaatttaacctggcggaagggaggggttgccgcgcggcgtgccgcgcaacaagccaagatgtttatttgccggcgacgaagatggtgctcatgctgcgcagccgcagctttttcatcgcgctgtatttttgcgagaagatggttttcgggtgcgtgccgcgtttttccgcgatatgcagcaggctgtcgccgcgcagcagattgaagatcacgtcgctttccgccgggctgagctcgcgggttttctgcacccggataccgcccggttctttgctttccagcagccgctggattttttcctgcagcgaataaagcggaatgcgggtagagaccaattcaacggaaatccccaggatcgacagcagtttcactacgcgctcgtcgtcatagaacaccagcaggcgcgtcttgctgttgtactgctggtgcagggacaccaggctttcgatcacgttgacgctctgttccaggttttgcgaggtgaaaatcagcgcgatatcgtgcttggtgatcttttccgctttggcgccgccgtgcatgaaatcggaaaacaggcggatatcgtacgcgccgtaatgtttcttcagcagcaccgacaggccaacatagctgtacttacactcactaatcacaagaacgttgtttttagacatagggcaaacaccaataccgagttaaaagtattcagctgtaagaagcgagttcaaatccttgatgctggattccttccacagctttccctgcagtgcgtaatatggcatttcatccagccatttcttgtgttcgggagtttcaactccttcgataattaccttgtaatgattaaggtaaaagaagcgcagtaacgcgcgcatcaagccctcgccgccggactttttcataaagtcccagagcagaaaacgatcgagcttaacgaagcggaactggctgttgtacaacgcggaaaaacccgcatagccagaaccaaaatcatcgagccaaaatgaataactattcaatgacggatcgccgtgcacgcgatctttcaccagccgggttgaattctcgctgatctcaaaatgaatacagcgcagggcattaattctctcggcaaagtgactattcgccagcgattgcagggaataatcgtcaacattcaaagtggctatcacttggttttcatgaaaccagtgtttgtatttatcgatcagattgatctgatccatcaaaatctcaatccgggtggcgctgtcggcgtgacgaaagaactgttcaggagaaaaatgggcatattcgctattaaacgtaaagcgagacagacattcaacggccagcaattgtcccgacttcgcgaacattggctgaaaaacataattaatgccgttatttttctctctgaaagaaccgctcatttcccaatccttggattgatatttaacttgttgattttaaatgattaaaaagaaagttactccaggtttattggtaaatttcttatttaaagcgtcaggatggccgaaacgtgtcgacagaccattaaacgcgtaattcgtgccaaagtccaaacgtcgcaatctgttactaaatgtaaatattcgggataatattctgattttcaggccttaacgcaaaatcttgaactctgcagctttcccaaacacagattattcctattcatatgaatcgtcaacatcgatcgataggtatccgccgatagtttattcctatcaagagggggcttatgaatgttttaaacgatttaacattaagaatatgcttagtctatatttcgtccggcaatgagttcatcgaggcaacgctccttttcagcaagggagtgctatcgctgagtgtatgctcagtggcggcaatatatatataagcccgccactgaatcgattattttattgttctatggagctggaaatgaaaaaagtattattgcctttggctgccctggtattgtctgcaactgcttccaacgcaatggcagcaaacggcaacgttaaattcaccggtgaaattgtacagtccacctgtaaagttgttgataaagaccagaataaagaagtttacctgggtaaatatcctaccaccgctttcccaactgccggttctaccagcggtgctaaagctttcgatatcagcctggagaaatgtgaagcgggtaactacaccctgcgtttcgacggtaacaccccagctggccacccagagctgttggctgtaactggcggcgcgactggcgttggcgttgaaattctggataacaacggttctactctgccaatctctcaggaagtggctaccccagctaccgtaactgttgctgctgatggcgataacccaggtgctgcgactttcaacctgcgcgctcgttacaaatccttccaggatctggtaactgccggtcaggcaaactctaacgctaccttcaccatcgaatacaaataattcgctggcaggatagatagagttattggccaaggatggctaaattttgagagttgagacattccgatgaaaaaaattctgactggtattttattcgcattctctgttaatgcctttgccggcattcaggttgatgcgacgcgtgtcatctataacagcgcaagtaaatccgcatcgctctcaatcagcaatgacagcgacgatacctacatggtgcaaacctggctggatactggcgatgcaagccagatgcctaagaatttgccgatcgtggtgacgccacccattttgaagctggctgccaagaaagacgccattttgcgttttatctattccggcagcggtttgccgcaggacagagaatctctgctctgggtcaacgtacaggaaattccgccaacgcctaagcaagataacgtgctgcaggtggcgatccgtactcgtatcaaactgttctatcgcccggattcgttgaaaaccaacctgcaacagcaggcggaagcgctgaagtggaagcgccagggcggcaatttagtcgtgactaacgatggcccgctgtttgtcacgctgggcgtgttgaacctgaagagcggcggcaagagctggaaagtgaacgccgacatggtcaagccacacgacagcctgcgtatttccctgcctcagggggcgcaatcagccaacaatatgtcgtttacctatatcaacgactatggcggtcacaccgagattaaaaacgtcgcactgaattgatttgaagcacttcaaggaatgaaagaaatggcacacaaaagaataacaaccctcgcgccaaaacgtttggtgaagctgattaatggtgtaatttatttttctgctgtgcctttttcattctcacatatggccatggcggaggagcagttcaacacctccttcatccatggcgatgacaatatcgcccaggtggcgtcgttggccagcggggatgacattctgccgggtaaatatccgtttgatatctatctcaacgggcagcgtatcgatcaccgcgaaatcgagttcaagaaagaatccaaagactctccggtagcgccgtgcctgacggccgcggactatcaggattacggcgtaaagctgcccggcgatctgaccaccgccggtgccgcgcaatgctacgcattgccacaacagatctccggcgccaagctgagctatgacgccgccgtacagcgtatggatctggaagtgccgcaggtgtttctgatcccacgcccgcaaggtgccatttcgccgaaagtttacgatcgcggcatcaatgccggctttgttaactataactttagcggcactcataaccgctacggcaacaatcagaacgacaagacttccgactattacttcctgagccttaacaatggcctcaatattggcgattggcgcctgcgcaacaactcgacgttgaaccaacagtcgggcgccggtacgcattggaagaacatttccagctgggcggaaacggacatcgtttctctgcgcagccgtctggtgatcggccagaccaacaccaataacaatgttttcgacagcattcagttccgcggtgtgcagatgtccagcgccgacgacatgctgccggaaagccagcgcggctatgcgccggtggtgcgcggtgtggcgacgaccaacgcgcgcgttgaagtgcgtcagaacggctataccatttacagcaccaacgtgccgccagggccgtttgcactgacggacattttcccaagcaccctgagtggtaacctggacgtgacggttatcgaagccaacggttcgagaacctctttcgtcgtgccgttctcctcggtgccgaacatgctgcgcgaagggatttggaactatcagctgaccgccggtaaataccacgacggcaccagccgctatcagcccaagtttgtccaaggcaccttgtcgcacggtatggcgtatgacatcacgccttacggtggcgtgctggtggcggaaaactaccgttcagcggtcgtaggcctcggtaaaaacctggggaactggggggctgtctcttttgatatgtcctattccgacaccaacctggtgaacggcgatgacaagcagggggagagtttccgtttcctgtattccaagtcgctcaacgattgggggacggaattccgcattgccggttaccgttactcgacctccggctattatgatttctccgatgcggttgccgagcgcgaacgctatgagaacggttattaccgtaacgattactacgatcaaaacgatcgcaacctgggcgtgccggactgggcggaatctcgccgtcgcagctattacaccagccgtttcaacaacaaacgccagcgcgttgagctgtctgtcaaccagcgcatcgccggtaattcgacgctgtacgccaacctcagcaaccagtcttactggggcggatccggtgaagaccgtaccgtacaaaccggttttaacagcagctataaaaatatcagctatggcgtcttttatcaggacagccgcagcaactacggctataaagaccgcagcgtcaacctgaccgtatcgattccgttcagcttcttcagcaaggattcgtcggacatgaccgccagcttcaacgccggccacagcaagcagagcggcaacacctacagcgccggcctgagtggcaccgcgctggatgacaaccgcttgaactatgcggtgcaaagcggtcatgatcgttattcgggccaaaccagctcggccaacgtcggttatcagggcagcatggggaccatcaatgccggttatagctacagcaaagattatcagcagtcttcgttgggcgtggcgggcggtatcgtcgcacactccggcggcgtgacgttgacccagccgctgcagaatacgtttgtgctggtggaagccaaagacgccaagggcgttcgtatcgaaaaccaacccggcgtcgccatcgaccgcttcggttacgcggtgatgacctctgcgtcgccataccgccataaccgcgtggcgctgcgcaccgaagatatcggcaacggcctggatatcccgatggcggcaagagacgtggtgccgacttacggcgcaatcacccgcgtgaagtttgaaacgcacacgggccaaagcctgttggtacacagcaagatgaccgacggcagcgtaccgccgattggtgccaacgtcttcagtgcggatggtaagaacaacggtactgtcggtaccaacggcgatatttatatctcaggtgcctccgcaggggatcgtctgctggtgaaatggggcaacgacgcgggcgaaagctgctcactggtggtgccggaattgaaagcggcgaccgaacagttgatgggttatcaggaactttcgctgacctgcggaaaaccgtaaaaggaaaggatatgtcttctttgttaaagcataagaatctcggattggcggctgggctgctggtcacgctgggcgggttttcgcagagcagctatgcgttgtcgtgtaagcagaacggcagcattcgccaggatatcgtgctggataaggccatcaaggtgtcgacggctaatactgctccgggggcattgctgtggcgttcgcagccctttacctctacgttccagtgctctgatacagacaatatgccgaaaggcgaagacgcatttttgtattgggatccgcagaataaaatgcaaaacatccacaattcaatcgaagtgggtgtgacatttaaagggattgacgtcaagccggtaaagaatcagcgtgagaatgttggtccgggtacagtatgtagcaacccgccacgttgtagcaggccggcgacgagccaaagcgtcaccgtaacatactctatctacattaaagcgaccggcaaggcaccgccggcgggcggaaaaatcacagacaataatgcctattcggtgttccaggttgatggcgtcggcggcttgaacagccgtccgaacagcaactttaacgcctacatctccgggctgggcaatattcagtttatctcctgcaacccgaaaatcaccgtggtggccaacaacggttcgacggtgaactttggcaccattccgcgtcagaatgcggtggtgggtaaaatcgagaagcaggtgccgttctcggtcgccgccaatatgtccgatccaacgaccggtcaagactgcaaaggggaaacgctgcaggccagcttcagcaccacctacccattgcaggataacagcgtgatcctgccgaccagcgacagcggcttcggtattttgatctcgcaggcggcgacgccaaatacgccgatcatgatgaacagcccggtcgatctgggcctggtcaacggcaccatcgttgaaaagaactttatggccagcctgaaatggttgagcaccaacccgaaggtagggccgttcagcgcatcggcgaatattgacgtcaccttcaaataattcggtgtctcgtcaatagagaaagggttcagttctcgcgaactgaacccttttttgtgccttataccgcgctgattaacgcagccccatccagctggtgcaaacgccttccggcggcttgccggcgtaccagcggggcagcgtgggggcatcgtggcgcggttcggcctgcatttctatcggctgcgccggccattctgcgacgtcccagcgggtggtgcggcgatagaccgccggggttttgccgaactgtttcttgaaggcacgcgagaacgaaggctgagagtcgaaatggtattgcagggcgatatccaggatcggtcgtggagtggagcgcagcgcctgcgccgcctgcgaaagacgccgctcgcggatatagctgccgagcgcgtggccggtggtgctgcggaacatgcgctgcaggtgccatttggagtagcccgacttggcggcgacgttgtccagcagcagcggctgatccagatgagtttcaatccagtctagtaaatcgtgaatgatattgacgcgatccatggttttagttctcccgcaaaaacgacattcaggtcacagtgacttagcttaattatccaagaatatgctttgataataggcgtgactacgccgttacgcaagggtaagccggggataaaaaggtggccaaaaatgctctttgaacggcaggggaataaaagaaaggccgcataaagcggccttttcagtaggaagtgacggaaaatcagttagtttccggtttcacttcaatgtagttcagacccagcacgctgctggtgtaaccgcggatcttgttggtcatctcgatatcgccgttcagcttgtggccgtaggacgggatgatctctttcagcttgctctgccattccggcgtcgccactttgtctttgaacacagtttccatcaggtgcagcatgattggcgcagcggtggaagcgcccggcgaagcgcccagcagagcggcgatgctgccgtcttcagagctgacgacttcggtgccgaactgcagcacgccgcctttatccgcgtctttcttgatgatctgtacgcgctggcctgcggtccacagcttccagtcttcctgcttggcgtccgggaagtactctttcaatgcggcgaagcgatcgtcgtcgttcatcatcagctggccgaccaggtatttcaccagatcgaagttatccagaccgacgtgggtcatcggcatcaggttcgaggtgctcagcgagtgcagcagatcaaacagcgaaccgttcttcaggaacttgctggagaaggtggcgaacggcccgaacagcagcacgcgcttgccgtccagcatgcgggtatccaggtgaggcacggacatcggcggcgaacctacgctggccaggccatacactttggccaggtgctggttggcgatctccgggttggtcgtgaccaagaactggccgccgaccgggaagccgccgtaaccgtcggcctcagggatgccggatttctgcagcagggtcagggacgcgccgcctgcgccgatgaacacgaacttggcgttaacggtggtttctttaccgtcgcggttcagatcggcaacggttacgctccaggtctggtcggcgttgcgcttgatgtcgcgcacttcgtggctcaggttcagcttgaacttgtcgctggcgctcagtgcgtcaaccagctggtgggtgatcacgccgaagttaacgtcggtgcccagcggcatgcgggtcgcggcgattttctgcgccggatcgcggccgttcatcaccagtggcgcccactgtttgatttgcgcagggtcttcggagtattccatgccgcggaacagggtgctgtgctgcagcgccgcgtagcgtttacgcaggaagttgacgttgtcgtcgccccacacgaagctcatgtgcggcacgctgttaatgaaggatttcggatctttcaggacattgtttttcacctgataagaccagaactgacgggagatttcgaaagactcgttgaccttcaccgccttgctgatgtcgatggtgccatcggctttttccggcgtgtagttcatttcgctgaaggcggagtggccggtaccggcgttgttccagccgttggagctctcttccgccacgccgttcatgcgctcgtacatgtcgatggtccaggtcggctccagctcatgcagataggtacccaaggtggcgctcatgatgccgccgccgatcaacaccacgtcgacggttttattcttctcttcagccgccgcctgttgcgtaacgccaaacaggctgagactgaaaatcaggacgagtaattttctcattgaattaaatctcttgtgtgtaaattctactcattgcaggtgaaagaatttagcgggagttaccctggaaataatgaagccgaccgcccggcgtgagccgataggcagcaataatgcctttttgttaatagggtttttaacgaaaagtgaactattgcaggccgtccgggtgcaaattgatcggttcacgttactggcggggtattattgtttgcgagaatgttaaaaactacttttgtaactaaaaaaaatgaatataagcaaaaataggccggttgctgtcgtagtaataaacaaagagggaagaaaggtcgtataaccgcgttattttcgggggttaattgtcgcgcaattaaacgttatttcgttatcacacaataattgcggttaaattgcaaatacctatcggtaaccaataataaatggccgccgttgcgggcggccatcgtgcagaaggcggttacttgatgcccatcgcatcgcgcatggtgaagaacagatcggtctgatcggtcaatcccaccacgttggcggcgtgcgggccgtaggccgcgacgcgcaattgggtgccggtgtgcccctgcgactcttcttccgagttgccgtagctgagggtcatcggcgcgccgtctttggtggtcagcatctgggtcaggcccggcgctttggcgtcggcggcgacgatctggctggagtgtgcatggtcggcggtgacgatcaccagcgtgttgccgtcggcgcgggcgaaggccagcgctttttgcaccgcttcgtccagatcgacggtttcaccaatctgcccgcacgggttagcggcgtgatcctgcttatcgatcgacgcgccctctacctgcaggaagaagccgttcgggttatctttcaacagtgcgatcgctttttcggtcatcgccgccagcgttggcgtggccgcggtgcgcgccgggttgttttcgcaggttaccgccggcttgtcgaggttgccgtgatagctggctttcggccccagccagcgcaccggcatgttgccgtcggcgaacagacccagcagcggtttttgctggttggccagcgtaacggcctgcagctcatccgcgttgctcacccactggtaaccctgcgccgccgcctgatctttcagcgattttccttgccattcgccgcttttcgccagctggttgaaggacttcgcgccgccgcccagcgtgacgtcggcgcgggttttcagcaactgctcggtgatggagccgcggccgccgttttccagcgcgttagcggcgcatttctcgctggtttcctccgggccgtagcatttgcgcgaggtgacgtgcgacaccagcgccgccggcgtagcgtcttgcaactcggcggtggagacgttgccggtggccttgccggccgccttggcgatctccagcagcgtcggctgatctttgccgttcacgtccacgccgagcgcgccgttataggttttcaccccggtggtccaggcggtggcggaggcggcggaatcggtcacgtaatccggcttgtgggttttcttgtccagcgagtagtgggtgtattgcccggtcagcggcagggcgtcgatgcccttgaagtaaccgcctgcgccttcagcgtaattgcgcgcggcggtgatctcggaatcccccatgccgtcgccgatcagcagaatcacgtttttcgctgttttgtccgacagcgacgccttcagcgcggcggtctgatcgccggccagacgacgggcgccgcccggttcggcgaggttgccgtgtgcggcgcgttcggtcaggccatcggcattggccgaggtttccgccgcgatggcggaggaacagagcagggcggacagcacggcgccggcgatcagggatacagcaggttgcatggggtaagctccttgtcgtaatacaacaatgtaaataacatcaaattgttacgaaaggagagtagagcagagggatgacaattttatgacaatgaaagacgggatggcccggcggccaccccgtttgacaatcaggccgcgcgcgccggaatagccagcccgcgctgcaccgccggccgcgccagaccgcgctccagccactgcgcgacgcgcgggaaactgtcgaacgccaccagttcgcgcgcctcatagaagccgatcaggttacgcacccagcccagcagcgaaatatcggcgatggtgtagtccgcacccatgatccagtcgcggccttcaaggcgcgtttccaatacgccgagcagacgtttcgattcgtttttgtaacgctccagcggccgcttgtcttcatattcgcgtccggcaaacttgtggaagaaaccgagctggccgaacattgggccgacggcggccatctggaagaacacccactgaatggtctcataacgctgcgccggatcctgcggcaggaaacggccgctcttttccgccaggtagagcagaatggcgccggattcgaacagcggcagcggccggccgccggggccgtcgggatcgatgatcgccgggatcttgccgttcgggttcagcgccaggaattccggcgtccaggtctcgttgttgccgatgtcgatcaggtgcgcttcataaggcaggccgatctcttccagcatgatggacactttgacgccgttcggcgtcggcagagagtagagctgcagccgttccgggtgctgagccggccagcgtttgacgatcgggaattgggtggaatcgagcatggaaactcctcgggttggcggggttgcttaagcgtaccccttgagtattgcagtaaaactaccccgccgccgggttacaccgtgaggtcaaaatgtgcggccagcgcttttttaccggcggggggcagctgcagttcgcggctgtcgagccggcggacgatccagccgcgttggataaaggcggctaacagcgcggcgcccagcgcgccaccgaggtgagagcggcgttcgctccagtccaggcagccgcaggcgaagcggcggcgggtgggagcgggggagcaatcgacgcccagccgcgccagcgcggcctgaccgatgtcgcttaaccggtagtcttcctcgccggtcagccagttcagcgcatgcagccgatcgtgcagcttcaccgccacctcgcccgccatatggtcgtaacaggtgcgagcatattgcagcgaggtgggcgtgctgcttttcaccgacgggcgcggcacgcccgccagcgccatcagaccctccagcgctgcggccaccggttgcccggccagccgaaaatagcgatagcgcccctgtttgacgcaggcaatcagccgctgctccagcagcttcgccagatgtgcgctggcggtagacggggcgacctcgaccgccgcgctgagctcggtggcggtgtaggcgcgcccatccatcaacaggcacagcatgcgcgcccgggtgcggtcggcgatggcggcgctcagcgccgctaaacgatcttctatctcgatgttatgcatacttcgaggttagacgaagtatgacggcgcgtccatcgctagcctgtagctatcgcagtctggtgctgtgcgtccgtgtccgctggatattgatgagcgggcgttgaaatcggtgcagtggcgccgttcactgaatgcgcgcgtgccggaattttaccgttgagaggagacgaggatgattgccgtgatttttgaactgcaggccgccgacgggctgcgcgatacctacctgacgttggcggcggagctgaagccgctgctggcgcagatcgatggattcatttccatcgagcggtttcaaagcctggccgatcctgcgcgcctgctgtcgctctccttctggcgcgacgaggcggcggtgcagcagtggcgcaatctcgagcagcaccgggcggcgcaggcgcgcggccgtggcgaagtgctggcgcagtatcggctgcgggtggcggaggtggtgcgggactacgggctggaaagtcgcgaccaggtgccgcaggatagccgttgttatcaccgtacctgagaaaaagcccgccgccggcgggctttcacccgctatttcgcctcgctgcccaccttcatcgccccggcgtagctggcgcccatcccccaggcggcgccgtggtcgcgagcgatctgcaatacgccccccgccgtggctttacggctccagtcctgctgccattccagcatcaacgctacccagttgatgggcgtggcgcccgcctgaaccagacgctgcatggcgttgttttggctgtctggcgtaatgtcgccggtgacgtccgacaggatataaacctcataaccctcgcccagggcggacagcgccggcagcatcacgcagctggcggtccacagcccgccgatgatgattttcttgcggccggattgtttgatcagatccaccacgcgccgatcctgccagacgttgatggcggtgcggtcgtacacctgcagatccgggcgcgcctgcgtcacctgctggaataccggcccggcgaagcttttggcgttggccgaggccagaatggtcggcacgttgaacactttggcggccttggcgatgccggcggcgttattcaccagattggtttgatcgatagaggaaatggtcatgccgaacatgtcctgcagatcgaccaacagcaacaggctgttgtcggcggtcagcggctgcacataacccgcctggcggctatcggcggcgggggattgcgccagcgcggcgacgggggcggtggcggcgctcaggccgagcatcagggcgaacagggtctttttcattattaactccattattatcagtagattaaattcacttaccactcagggaagcggttggataaagtctacttaggttgttggggttaataatctgtgttttattgaatttataattaactatcaggacataatatggacgtgctactgacgatgcgcgcctttcgccgcgtggttgagcgcaacagtttctataaggcggcggaggatctggcgatcacgccggcggcgttgagcaagcagattaagcagttggaaagtcggttggggacgctgttgctcgtgcgcaccacccgcagcatgagcctgaccgaagccgggcagatctattaccaggaagcctgtcggttgctcggcgagttcgacgcgctggaacagacggttgccgccagcgcgcagcaggtctccggcacgctgcgggtcaatgcgccgctctcattcggcctgacggtgctgtcgccgctgttgccgctgtttatgcaacgttacccgcagttgcaggtggaactgacgctggacgacagggtattggacgtagtggcggctggtttcgatatttccttgcgcattcgccgacggctgccggactcttccctcagcgcccgggcgctgggtgaagtgcaccagcgaatttgcgccgcgcccggctatttggcgcagcacggcatgccgcaaacgccgaatgaattacagcgacacagctgtctggcctattccctggcggaaaggccggggcagtggcagttcaccgccggcgaggagagcctgagcgtggcgttcacgccccggttgatcgccaacaacagcctgatgctgcgggatatgttggtggcgggattgggcatcggttcgctgccgtcgttcgtggcggatcccgagatcgccgccggcaggctggtgcggctgttccctgaacagattgccgacgtgcatcaggtcttcgcggtttacccgacgcgccggcatgtgcagcagaaagtgagtttattcaccgagtttgtgcgagagcatggattgatgacggcgaattgacaacggcgtacggttgtcatattcattagctatgaaaaaatcctaccgcccattcgcgcaaattattatcacccttctccagagggtggggtagcgcgtgtgtcgccaataaaaacccgccggcaggcgggtttttttatccccttccggcaacgaccggagaacgtcatgaaaacctaccctgcagttttacacctgatgtgcggcaaggccggcgcaggcaaatcgacgttggcgcagcgtttggcccagcagccgcaaacgctgttgctgagcgaagatgcgtggctggcgacgctgtatgaacaggagatggccagcctgcaagactacgcgcgctgctccgaccggttgcggcgggcgctgggcgggcacctcgttcagctgctgcgcggcggttggtccgtggcgctcgatttcccgatgaatacgccggacaggcggcgctgggccaaagccttggcggaggaggccggcgtcgcgcactgcctgcactttctcgacgtcagccatgcgcagtgcctgaaccggataacgctgagaaatgcgcgcggcgaacacccgtttacactgagcgaggcggagtttgagcacctggcgcagtattttgttcccccggcggaagaggaagggatgactatcttgcgttatggcgaacgggactgaaaaccggcgccatgacggcgccggcaacagggttaggcttcggcgttaaacgcgttgtggaaggtgacctccgcgcacggcagcgcgccctggaaggcgatggcgcggaagtagtcttgtggcacgcccggcagggtcagcgcgtcctgcgcctggaagccgaaacggccgtaatagctcggctcgcccagcaccacgcagcctgcggcgccgcgttcctgcagctcggccagcagccggcgaataagccggctgccgatccccaggttctgacaggccggcagcaccgataccggcgccagcccgaaccaaccgacggcgccgttgctgagtgcgaccggtgagacggacgcgtgcccgagcggtgtgccattgtgctcggcgaccagcgacagggtgagggctcccgccgcgcgcagcgcattgacgataaactgctcggtgtggctgctgtgttcggcgtgcaggaatgcggcggcggtcagggtggcgatggcgccgacgtcggccggcgtttcgtggcgtaacgtgatgttcatggttgtatcctgattcaataacgctgtgccgaccgggctgcctgcccggccggtatcgatgattaacggttatccagctgcgcccgcacggccttgagcccggcgaaggtgacgcgataagggcgcccctggcgagagaggatcaggcgtttggttttgagcttggtgaaaacggccagcgagcagtcggccaggccgagcccttcgcgggtgtagcattcgacgtgggtgacgcgaccggcgtcgttgcgggtgaaggcgatatagccgcctttggccaacacgtgcagcacgcgttgttccgctttggaaatgttcatgttgggagatcctgtaataaccccagatacgcgcatccccgcgcaaacgcgcgtcggatacgtcagagtccctcgccatgcggcaaggaagcgactatagggtggttacaatctccaacatacaggcctcgggcagtgaaaaacgccaggacggcgtttaagcgcagttaatgtagccaatggccggttggctgtcaatttgccggcgacgcgggccgccggcgcaaggccaatcagaaaggtttggtcggcaggtatttgccgtccagggtgatcaccgcgcgttcgccgccgtccggatcggcgaccttcttgatatccagcttgaagttgatggcgctgatgatgccgtcgccaaactgctcgtgcaccagcgctttcagcgtggagccgtagacctgcagcatttcatagaaacgataaatggtcgggtcggtcggcacgccgccgggaatgctgccgcgcagcgggatggtttgcagcagctgcaccgcttcttcatccagccccagcttggccgccacggtgcgcgctgccggttccggcagcgcatgctgcccgagtagggcggcggtgacaaacgccaggctgaggccggtgccctcggccagcgcttcgaacgtcaggttatggcggatcttggcggccatgatggtgtcggtgagcgcttcgcgcggggcggcgttatgcagagagtgtgtcatgttggctccttttgttggcttaaaaacgggcgatcgccggcgtggcggtcacctcgggatgggtggcgagcggcacgaagcggcgggtttcgccgtccagcgcctcgatagcgccgctggcgatgtcatagacccagccgtgcagcgtcaggcggccctgatccagcgccagggcgacggaagggtgcgttttgatgttgttgagttgggcgatgacgttctcgcgcaccatcgacgcgacccgcgcttcgtcgcaggcgtgcggataagcctgattgaccgccttggcggaatcggcgtaacgcagccagccggcgaccgttggcaggtgatccagacattggcaggtggcgatggcggtcatcgcgccgcagtcggaatggccgcagatcacgatatcttccacgcccagcgcggcgaccgcgtactcgaccgaggcggtcaccccgccgggttcggggccgaaagaaggcacgatgttgccggcattgcggataacgaacagatcgcccggctcgcgctgggtgaccagctccggcaccaggcggctgtcggaacacgagataaacagcgtacgcggattttggcgggtcgccagccgctgaaacagcgccgtgcgttcaacaaaggcttcgcgctggaacttcaggaagccctcaattacctctttcattgtttttctcccagggggtaagcgatgacggcatgatgaacgcttctggctatagggtctaagacccatttataattctggctataggttttactaatagttggggcgctatgctgctgcgacatatccgttattttctggccgtggccgaacagggcaatttcacccgtgccgccgaagcgctgcacgtctcgcaaccgaccttgtcgcagcagatcaaacagctggaggatgcgctgggagcgccgctgttcgatcgcagcggcagaagggtgcagctgaccgacgccggtgaggcctggatgcgctatgcgcgcctggcgctgcaggatctggacgccggcgcgcgggcgatccatgacgtggcgacgctggcgcgcggccatctgcggctggcgatgaccccgaccttcaccgcctatctggtggggccgacgatcgatgcgttctaccgccgctacccggggattacgctgagcattgaggagatggcgcaagagcggattgaggcgctgctggcgcaggatcggctggatctgggcatcgcctttgagatggcgcagtcggtggaggtggaagcgacgccgttgttcagtgagacgctggagctgatggtcggcgccgaacatcccctggcggcgcggcgccggccgctgacgctggcggaatggcggcatctgccgctggccttgctgagcggcgatttcgccacgcgccagtttatcgatcgctactgcacgcagctcggtttccggccgctggtggcggtggaggccaatgcgttgggcgctatcgtcgagatcgtgcggcgcgggcagctcgccacgctgttgccggccgccattgcacgcgagaaccggcagttgaaaaaagtggcgctggacaacgccatgccggctcggcaggcggtgttgctgcagcgccaaggcgcttaccgcagcgccgccgcacaggcgtttatcgccgttttgcagcaacagggcgttacgccaacgccccccagcgctgcgtcatccccagcagatgcaccagcccgaagccgaggcaaatcagcgagctgacgatgataaagcgttggctgcggccggtgtcgcgcagggcgaaagggccggcgacgccgcgcagcaggtagataaaggtgatgataaacagcgcgggccgcagcagcggcagcggcgcgatcaggcccgcgccggacagcgcatacagcgcccaaataaacagcaccagcgcgataccggcggtgacgacggccgggaactttttacccgcttccgccgccttaatgaagcgatcgccggcgccgcacagccgatagccgcgcggcccggcggtgatcacccaaatatgcagcagggcggcgatggcgctcagcgcagcgccgatcagcagcgcggtgttatagaggtgtggcatggttcagcatccttgtcatcaacatgtctggcatcaagcgtagaccagaatgggtaagtcaggccggggggagctcaacggccgacatttgcagcgcttcttcaggcaccacgcgggcctgcgcatcgataaatgccagctgcaccggcagcccgctgtgtttatccaccagttgaacgtgggggctgtcatgcagaatatgccggtggccccatgccatcagcgcaaccaggatgggccccaggctgcgccccttgtccgtcaagacatattcatgtcgctcacgctcgcccggctcccggtaagcgcgtttggccaacagttcttgttctaccatggcattcagacggttgctcagcgcctggcgcgaagcgccgatattctcgcgcagctcttcaaaacggcgaacgccgtagaatgattcgcgcaggatcagcaacgtccagcgatcgccaagcaggtccgcggcctgcgccagcccgcacagggcaagagaaacggtagggagatcgggagattttgacatgggcattttccttcgctagtctaagtcttgtttttagacttatctatattcaaggagagtataatgccatttgttaatgtgcaaacggtgaaaggcatgctggatgaacggcaaaaaagcgaattgctgtcccgcattaccgatctgttggtggagatagaagggcgaggcgatccggcgttcagacagtcggtttgggtcagaatcgatgaacatgcgcccgaacaatggagcctgggcggtgtgaagccgacggcggcgatgattgccgcgaagttcccgccgcgttaattcaactatgccgcctgcgaaaaggataggatgccgcaggcgctcaaaatgtcaccgaaacttcccgcgatctctgtaccccgttgtggcataatgcgcgccaaatcacattccctatgtataaagagcgagcgctgtgttaagcactaacaacatcaccatgcagttcggcagcaagccgttgtttgaaaacatctctgtcaaattcggcggcggcaaccgttacggcctgatcggcgccaacggctgcggcaagtccacctttatgaaaatcctcggcggcgatctggcgccgagcggcggcaacgtgttcctcgatccgaacgagcgcctgggtaaactgcgtcaggatcagttcgccttcgagcagtacagcgtgctggataccgtgatcatgggccacaccgaactgtgggcggtgaaggaagagcgcgaccgcatctacgcattggcggagatgagcgaagaagacggctataaagtggccgatctggaagtggcctacggcgaaatggacggctacagcgccgaagcgcgcgccggcgaactgttgctcggcgtgggtattccggtggagcagcactacggcccgatgagcgaaatcgcgccaggctggaaactgcgcgtgctgctggcgcaggcgctgttctccgatccggaaatcctgctgctcgacgaaccgaccaacaacctggacatcgacaccatccgctggctggaaaacgtgctcaacgagcgcaacagcaccatgatcatcatctcgcacgaccgtcacttcctgaacatggtctgcacccacatggcggatctggactacggcgaactgcgcgtttacccgggcaactacgacgaatacatgactgccgccacccaggcgcgcgagcgtctgctggcggacaacgccaagaagaaggcgcagatcagcgagctgcaatcgttcgtcagccgcttcagcgccaacgcctccaaatccaagcaggccacctcccgcgcccgccagatcgacaagatccagttggaagaggtgaaagcctccagccgccagaacccgttcatccgtttcgaacaggataagaagctgttccgtaatgcgctggaagtggaagcgctcaccaagggcttcgatgacggcccgttgttcagcaagctgaacctgatggtggaagtgggcgagaaggtcgcggtgctgggcgccaacggcatcggtaaaaccaccctgctgaaaacgctggtgggcgacgcgcagccggacagcggtaccgtgaagtggtcggaaaacgcccgtatcggttactacgcgcaggatcacgaatacgagttcgacgacaccctgagcgtgttcgactggatgagccagtggaagcaggaaaaagacgacgagcaggcggtgcgcagcgtgctgggccgtctgctgttcagccaggacgacatcaagaagaaagtgaaggtgctgtccggtggcgagaagggccgcatgctgttcggcaagctgatgatgcaacgcccgaatattctggtgatggacgagccgaccaaccacctggatatggaatccatcgaatcgctgaacatggcgctggagatgtacgaaggcacgctgatcttcgtctcccacgaccgtgagttcgtcagctcgctggcgacgcgcattctggaaatcaccccgaacaaggtgatcgactttaccggcaactacgaagactatctgcgcagccagggcatcgtgtaagcctcgcggcaacgcatcagggcgggaattatcccgccctttttttatccgtcattccccgccgcacacctcgcagtgcggatccttcggcagctttatctcgcggaactgcatgctcatcgcatcgaacatcaacagtttgccgcgcagcggttgactgtacatttttcatagtaagctaagtgcctcagtccccttggcgttatacaaaggatttacgtaaggcaatgttttacaaactttgcgcttttgcgataagacgctcagatgtagcctgcacgttcaaacagccggctagatcagctcttctgagatcaatatgcaatcgccatagcaattaaatttatcgaagtcctgtaatccaagataggtgttgaaacttaatccctccccatgtttggctgcctgttgagatgtaatgctgcaagccagcgataatgccagcagagtttcattccagtatggccgtttcatgccatgtcgcgaaatatgcgatgcggagcgaacacgcgacaagcgttgaggccgcaaaatgcatgatttatggacttcaacatcatccgagtcgtcaaccaacaggatccgataaacctgtgtttgagacaactttttgatgatggtcgatgcaaaatcactgaagccaatgataataaacgtatcccctttttcggcccgcccaggcagctcccggatgacctgaatatcggccaagagagggaagtggtctatcatccggttggcataagcattattctgtaccaccgcataaacatttccaccctgacaattaataatgctgtcatcaatgcaataggccatcaaggcggcatcatctttctgatatttcattacctcgactcggttaactttgttagattcgccaaactcacacgctgtcgaggccggtaatatcaggggtatggattgtcggagatataacggtaatgccgccaacgcggcaaaactggaaaaatggccgacaaccacgtctgcgccccattcaattagctcaatagcggcacgctctcctcctgccgacgatttttcgtcgttgacaattttcaacgtgttttgtttgaactcaggaaaatgcttgaggctataattaatagcctcaataaaggttcgtgtatggctgttggcgtctttccctaacgctatcgccagtccgatctttttcatcgtgtcgtcacaatcacctgttggctgtagttcatcgctttctgttctgtctcctggcgactgtcgcccttaacgcccaggaaaccgataatatcgttccccaacggcggccgtttgatgacgctgccgagtggtgaaatgattttcagcatgaaggtgttcggatcctgcgtaatgtgttcagggacactgatgatgtcgatccgcccaggcgaggagatcaggcaaagcgcaaacgtgtgtttaccggttggcgaataacacaggtagtccggtttctgcccaatcgccatatcaatgaccgctttgatagggcaatagccggcggagatgcgggccataaaatcgaggccgccgccgccaggccgggcggcaatctcaacgatgtagggtttaccctgatggaaccggatctctgcgtgcatcacgctgcgcgtcagcccctgcgccacggcaccggcatgcaccacgtcatgcacgcgttgcagatccagaccatcaagatcggtcggcgtgtgatggacatcatcatcaaacgagttcccttccagggtgacacgatcgacgatggagcccagcaccgtgacgccgtcccaggaataggcctcgatcagaaattcacgtccatccagatacgactcgaccagcagcgagttggggcccagtacgtcagtgatcccttcatttttgaactggctcatttctgatatgccgatcagggctttagggaagaactccgccatttgttcaggcgtgtcgacgcggtagacaaactggctggccgaacccagtgtgggtttgaggatcaccggataaccgagggtcgccgccgcctccagcgcttcaggcagcgtcggtgtcagccgaaattccgggtgaggtgcctgaccggcgcggtgggcttcacgcatggcaagtttgttgcggctttttaccgccgcctcaaccgggatgctcggcagctgcagggcgtcggcgatcatggccgtggcgatcacgctgttctccgcgaaggtgaacaccccgtcaaagtgaaaatcccgatgcagctgtatggccagcgtggtcaaatcgttgatatccatactgtcggaaacgaagaatcgcccggcatgccagtgatcgctatcagccagcccggacaggacatacagctcaataccgtgctgttccacctgttggtagcgcgaattgtagtaatcgccaaattgcccgacttcaatcgccaataatttcattttgtttttcctttaaagaccagggttgatgccaaaagcgccaggaagaccacagccagcgccaacgccacatatccggccaggacagtggtgctatcgaccagctcgccaatggcgtaggtcagtacgacggctgacgtcagcccaattgcgttgctgaagccgaagaaacggccggtgtaatgggaaggaatggtgttgaacatcagcgtgcggcacgagatacgcgccaggccaaaacacacggcaccaagcgggaagaagaccatcagccacggcaacgtaaattgcggctgcagggcaataaatgccgcattcgccacgtagccgaacatgacaatcgtcagtaaggaaaaacgcttctgcaggaacggtgtcatggcggcggcgatggctacccctacgccggccagtgcatcaaccacacccagaacgccggcgccggaggcaaaatgtttggtgaccaacagcaccaacagcatattgctgaccgtcacgatgatgttgccgacgccatacagcagcatcagccagggttttctcacggcgggcaaggtagttgccggcactggttcggaggcggtgtagccttcgggcacttcatctgatccctgtacacgcggcgtcagcatgaaaaacagcgccgcactggcgatgaaggtgatggcgttcagcacaaacacgaaatccacaccaatcagctggatcagaaacccgccgatcgccaccgatgtcaaagcaccaatttgcactgccatttcgagtttggcattgaatgcagccattctgcccgactctaccgaatccttgatgatggcgttattggccgggaagaacatagccatggtcatggacagcataaagctgcagacaaagatgaccatcgagggatcggtgaatgtattgataccggccaaaacgccaatgacgatagccgcgttgaccacgttggtaatgatgcagatcttctttctgtcgtaggtatcggacaacttgccgaacaacaccgagaaaaaggcttgcggcagcgcgatcagaatgaacagtgtgcccacggctttcgccgttcccatgctctgtgaaatgatcagcgcgttggcgatggtgagtataccgctccccagagtggaaaccagcgacgcggcaaggattagattttcgtttcttttgctgatctggcgggttgtcacgttcagcaaaatggtttcattactcattcgttaactccgtgaatggcatactggctgatctgctcggacagcgccggggcgatcttaaaaatagaggcatcgcacgcttcaacggcgatgcatccggtgacatcgtgccggccccagtaagcagtgccttgccgtttttcagccggcaattcaaagtagggcgacacgacgacatccacctggtcatatttaacgcgtagtcggtcaagtaaataccgcttacacacctgcaggtcgtgactgtctggcggcatcgagtaggaaaatcgactggcgctcactttaagcacccgacgttccggcgacggtacacaccatgatcgctgttcatctcccatcgtcagcaccggctttaacaaacacgcacggggatcgttgaggtgcacgtcaaggtgaacctgatattgcggcgccggagcgacgcctgaccggccaatgtgtcgggtgagagggcggctcgccgtgcaaatcaccgccgtgtagcttttacgctcaccgttaacgctaaaatgcctcccctcccgaatggtgccgagatctacgcgcgtatgcggtttcaacgcgatgctgcccgtgtttgccagcgcttggcacaaatgtgcatataccttttgtgcatcgagaagaatggcgtcatggccgacgaagagccgtcgattagaactgtgcatgcgcaacaggctgctctgtgtcgacaacacgggatcctggatgtcataacctatcgccagcgcgtcatacagctgcgccaaacgacgacaatcggcgtcatccaccacacgaatggattgcgtctgacaaccgactgcatcgctgcctgcgccgatgagttggcgccagaaagcaagcgagtgcgcagccagcggttgcaacgcggcattgttttcgtgcgcgtgtttccacagacggccatgtgcccacgacagattggcagcgttcggaatggcggcggcgtcatacagctcaacgcttgcgcccttacgggcgcaagccagcgcagtcatgacgccggtaatgccggctccgatgatggcgatgttaggacgcatatgacccactgttggtgaatgtggcgatcggcggcagttcaggcaaggcccattgttcactgccgttcagcggattggcattcacgatagcgtggtgaaggtcaatcataatcaaccccaagccgtcgacgaggacccgtaactgttgattaattgccttcaggctgatatcgctttcttccgcaaccagctcctgcaagcgcccaatatggtgcaggcaccagtcagccaatcggctttgactgaacgtctcgagacgacagggcagagccaggcgctgacgcatggtgtcgaccagcagaggagtattggcctcatcgtcattctggcgcaattcccagcgttgcgtggcgtatgcacgggcaagcgcattccaggcggaaatcagtcgttcgttaaggatttgactgagggcatctcggctgaaattgttccggttgtgttccggactggtcaggcaaagatagaaacgggcatagtcgcgaggcagggtttttaccagatcgcgggcccagatcaaatggccgcggctggtcgagaacttggcgttttccagctcgtaaaactcattgggcacgatggtgtcaggcaacaggtacttaccctcatgcgccatcagcaaggcaagatgcgtcactccccaaaaataggagttgtcgaagccgaggaaatacgccaggcgattacctgtttcagcacgccaggttgcatccgtcggcgccgcgttgttttcgccacaggcgttgcagtacatcgatgccggcatcccctccgcccaggcgttgagcacttgcccctccgtgccgggaaaatgcgatggcaatccccaggcaatggggtaagtgatagggaaatcgatcagctctcggctgaacagttccgtcattagctgaagaatgtgcaggcgccagctgccttttttcgcggcgtaataacgctccagctcggccctgtatgcttctaccgggaacaccaggatctccgtttctctgtactccagtgattcgtaggggggcaatgtcgccaccgggttttttaatccatcaaagttgttggggtgtccgcaactttcacacaatccaccgcgggactgcgccagacaggtcgggcattcaccggacacgaacgactccaccataaacgtattgcggtgtgtcgagtacggcagcctgacggttttgagccggaacttgccctgctcatgtaggggagacaaaaaggcgtacaccatttctttataaccgtcgtcgaacggggcataaccatccagctcgactccccagtcattcaggctttgcctgatgtcgtcggcagcctgacggcataaattttccggagatgtgcccagtttgtaggcactggtgacaacataggtttggctgtcatcagtgccggtcgcgtagttgacgcgttctccggtcaggcgcaggtagcgggcgtaaatatcgccggccaagtaaggcccggccatgtggccaacgtgcagatcgccattgggcgtgggcggtggggcaataacgagcgttttagacatggtctgacacctgatttttttgttgatgacgttgagcaaaacgtgaggacatctcctcatcccaccaaatgctgtacatttcgaacggctcggggctttcattgagcacgcaatgccgggtgaatggcgggaattgaacggtgtcgccggctttaaagcgcgttttttcaccttcgcacacaataaatgcctcacctttaatggcgacgaatatttcgtattcgtggtgttcatgcggagtcgaagacgtgccgggtgcaataacgcaccatgaactttcaaacggtgcgttcagctcgggccacggcatcaaacgctgggcgtgcagattgttctcgaatcgcatagaagtgcgatcaagtggtttaaaggaatgcatttttttccctaaaatcaggccgtgatatcgtcaataatttcttttgaacggaatgccagtacactcaacaatgaatctgcaatgccatgcgtgctttcattaaccccctgcagatgcagagaaacgccgggggcataaggcaaaacggcgcgataattgcggtcgacgcggattttttcgatatcaagatgatttgacaaactgtcgaagagtgtcggcgttttattcttatatcctgtacccagcaacactacgtcaaaacgcgcagagtgtgagtggcctgacttgttatctttccaggtgatcagcacaccgccgtcatcatctaccgcatgtaaaatatcgcactgtgtcagcattaccgcccgattttcaccacgcaactcctgcaaataatggaaacgataaagccctgacaaagttgatggggccacgccggaatagttggtggtatgcatcgccgccagggtcttttcacgggttgcattgtcacaattgaaatacgtgttgatgtagtcattctgaaataacgtattggtgaattgactgccttcataattcaccagcccgatggagcgcatgatcatggtgatattggccgtggggaaatgctcaaggcaggattgatacatttcggcactgctttgcgcgccgccaattaccgcgatacggttaactctaccgcacttcatttgttcgagagccgtcaggaaattggcactatggatcacattatccggtgagacatgctcaaacacagccgggatattgaggtcgcggccagccccaaaaatcagacggcgggcgcggtaactgtcgccattttcaacggttacgtgccagccagtaatttgcccttccgatgcaagttccggtctgactgccactactttgctgttgtaaataacctgtgttttctccaggccacccgctacccactgcaaataatccgaaatctctttacggtaggggttaaacgtctgcaggttgacaaaactgtccaggcggttggttttatgcaaaaaattgagaaagctgaaccggctggtcggatcacgctgcgtgaccagatccttcagaaaggaaacctgagactgcgcttcaggaaataacattcccctatgccaacaaacagaagtgtctttttccagaatgagagaagagttgatgttgtgaacttcagcacattcttcaagtgcgacacctactgcgaggtttgatgggccgcagccaatcattaatagatcggtgtgttgcattaattttttcctaaatccattttgtgtatagcaaactccgcattattgattgcgaatgattgccacctgtcatttccctggaataaagattttgacgctaattatattatttataacgaccacactttttgtgtgtggaaagaaactagcactccgtaaaatgacaaacaatacacataaagctacaaacgttaacttcagagtaacattttggaatgtgctttagcggcaggatgattcgtatgtatgaacagtatttcttagggttgtttaaaaactaagtagtagaattaattcatggtgctataaatttaatgaatgtttactatttttttataattataactgatcatgtagtgaaagatgttttgctgtatagtaatgccttagaaggagtaaccccatcatatcgacaggcttgatatactaatcagatcatgatagagaaaagagataatgaggtggtaaaccgtatgacaacagtgatcgaagtgctccaatacacgttaaaacccggcacaggcgctgcatttcacgatattatgaaagaacagagtgtacctctgcacctgaaaattggggtgaaagtattacgctttggtaattcactccatgatcctgataattattatctggtgcggtcatttctaaacgagtcagaaatggaaagtcagcttactcaattttatgctgatgctcgctggcgtgaaggcccacgcagtgcgatcgttaatatgatcagcggcagccatcgtgtggtcatgccggctgatccgttgatctattacgcactcggtgataatgagagcggcaacccattttcattccggtgagcttgttgccgactctaatatcttttcgtcttatattgcaataaagcgggtagcttcaatttctgccagaggcattttactttcacaaacgtattggaaaatatattgtgccacgattttccaacaccgacctctcaagctactaatgacgaagccgtcacgccccgccgcacacctcgcagtgcggatccttcggcagctttatctcgcggaactgcatgctcatcgcatcgaacatcaacagtttgccgcgcagcggctgaccgtagtcggccagcagcttgatggcttccatcgcctgcagagtgccgatggtgccgaccagcggcgccatcacgcccgcttcgacgcaggtgagggcgctgtcgccgaacagccggctcaggcagcggtagcagggctcgcccggctgataggtgaacacgctgagctggccttccatacggatcgccgcgccggaaaccagcggtttgcgctgtgcgtggcacaggtggttcagcgcgtcgcgcgccgccacgttgtcggtgcagtccagcaccagatcgcaggcggcgatctctgccgcgaccgcgtcatcttccagacggccgtcgatggcatcgatgcggatatgtggattgatggcgctcagttcctgcctggcggagctgactttgctctggccgatgcgatcgtcgcggtgcaggatttggcgctgcagattggagagcgagacggtgtcgaaatccaccagcaccagatggccgacgccggccgccgccagataaggcgcggcggcgcagcccagcccgcccagcccggcgatcagcacgcgggcggccttcagcttctcctggccgtcgaagtcaaagccgcgcagcacgatctggcggttgtagcgcagcgcttcggcgtcggtcaattccggcaacatgttcagctcctcagcagggcgttgaacggctcgatctccaccgtttcacccgccgccaccgaaccgcgttcgcgctccagcacgatgaaacagttgccctggctgtaggagctgaagacgtgcgagccctggtggccggtggtgctgacctccagttcgcccgcggcgttgctgctgaacacgccgcgctgaaaatcgaggcggcccggcgatttcttcagcggcgtcagcgcccgcgcgcgcaggcgcggcggcaggcgccagtcgctgtggccggccagcttcgccagcagcggttgcaccagctggtagaaggtcagggcggcggaaaccgggttgcccggcaggccgcagaaccaggcgtggcccagtttgccgaaggcgaacggtttgccgggtttgatcgccagcttccagaagctgacctggcccagttcgtcgagcatctgtttggtgtagtcggcttcgccgaccgagacgccgccgctgctgatcaccacgtcagcctggctgtccgcctgtgtaaaggcggcgcgcagcgcgtcgcgatcgtcgcggataatgccgagatcgagcacgtcacagcccatctgctccagcatcaggcgcaccgcgaagcggttggtgtcgtagatctggcctgcctgcagcggctggccgaccggctgcagttcgtcgccggtggagaacaccgcgaccttcagcttacgcatcacctgcacttcggcgacgccgagcgaagccagcagcggcagctgcgcggcgcccagcttcacgccggccggcaacacgctcgcgccccggcgaatgtcttcgcccgccagacggatattctggccggcttctaccggggcggtaaaacgcacgccctggtcgctcacttcggcctgctcttgcatgacaaccgcttccgccccggccgggatcggcgcgccagtcatgatgcgcacgcagctgttggccggccattggccgtcgaacggcgcgccggcgaaggctttcccggcgatcggcaatggcgcattggccgccagatcggcgaggcgtaccgcataaccgtccatcgccgagttggcgaacggcggcacgtcgagcggtgagaccaccggcgcggcggggatgcggccggcggcggcggtcagcgcgacggattcggtttgttgcagcggtgcgatctgcccgagcattttttccagcgcttgctccagggagatgagatcggaagtatggcaatgatccataaggggaactccgtaatcagggtgcgcaatgatagcgacaaagtgcggctattatggcagagaacgccgggggggagaacgggttatgcccgccatctttcgcactgcgccggaagcgcgaacgggtataaactgcctaaaacacaggaggatcatgatgcataaacaggttatcgagttctggttcgacgagatcgaaccggtgatgtggttcaaaaaggacgatgatttcgatcgtctgctgcatagccgcttcggcgaaatctggcgggcggcggcggcgggggaactggcgcactggcgcgacaccatcgaagggcgcctggcggaggtgatcgtgctcgatcagttcagccgcaacctgtttcgcggcacgccgcagtcgttcgcctgcgacggcatggcgctggtcctggcgcaggaggcgatccgcagcggcgagtgcgaacggctgagccgtgagcagcgcggcttcctttatctgccgttcatgcattcggaatcgccgctgatccaccagcaggcgctggtgttatataccgagcttaataacggcgaccagctggagttcgagctacggcataaggcgatcatcgatcgtttcggccgctacccgcatcgcaacgcaatattggggcgcatcagcacgccggaagaagaggcctttttacggcagcccggctcgggtttttaatcgtcggatcatctgcgcccggccgggggaaaaacagcaggccgggcgccacaataagcgtgactcagcgcgaacgtttatttcattacgccatgccgctatttcctctcgcgaaattaccaataatcccagccgcactgtcagcggtttgccgctttttataacctgctgtttttattccaataagctatttcaaggtgcgaaatggtctaagcgcgctacgctaaaagcgggacgtggacgttatgctgtacttccactgtaggactaaatagagtcgaaaaagactgaataataatgataccgcgctcagcttattcgctgcgcaacggcgggattaacacagggtgtcaggcaaatgagcaaaccagtgattgccattcatggcggcgcgggcgcaattacccgggcggcgttgagtgcggaaaaagaacggcagtatatccaggcgctgtccgagatcgtggccgccgggcaggcggtactggcgcagggcggcagcgcgctggacgcggtgaccgaagcggtgcggctgctggaggaatgcccgctgttcaacgccggcaaaggctcggtgtttacccatcagggcacccacgaactggacgcctgcgtgatggacggccgcacctgcgacgccggcgctgtcgccggcgtcagccatatccgcaacccggtgctggcggcgcgcgcggtgctggaaaacagtgagcacgtgctgtttgccgccgaaggcgccgagaagtttgccgccgcccacggcctggaaatggttactcccgacttcttctttacccaggaacgctttgatcagttgcaccgcgcccaggcggagcaggggcgggtcttgcttgatcacgacggcgcggcgcaggccggcgatccgctcgatcccgatcgcaaattcggcaccgtcggcgcggtggcactggatgcgctgggcaacctcgccgccgccacttccaccggcggcatgaccaacaagcaggccgggcgggtaggcgacacgccgatcatcggcgccggttgctatgccaataacgccacggtggcggtctccagcaccggcaccggcgaaatcttcatgcgcggcgtggcggcctatgacgtttccgccctgatcgaatacggcggcctcagcctgcaagaggccagcgatcgggtggtgatggagaagctgccggcgctgggcggcagcggcggcatgatcgccgtcgatcgccacggcaatatcgcgctgccgttcaacagcgaggggatgtaccgcggttttggctatgtcggcgatgcgccgtccgtcgggatttatcgctaagcgttcaccgggagggtgtatgaccgacgtttcattccggcccgccggcgacgggctgccattgccgccgcagcgtgtgctgtcggtgcgcgatctgagcatcagctttcctcaatcggaaggcgccgtggaagcggtgcgcaacctgtcgttcgagctcgatcgcggcgagacgctggcgatcgtcggtgagtccggttccggcaaatcggtgacttcactggggctgatgcggctggtggagcagggcggcgggcgcatcgtcggcggcgccatgacgctgcgccggcgcgacggcgcgctgctcgatctggcgcgcgcctcgcagagcacgctgcgcacggtgcgtggcgccgatatggcgatgatcttccaggagccgatgacctcgctcaacccggtgtttccggtcggcgagcagatcgccgaatcgctgcgtttgcatcagggcatggatcaccgcagcgcgcgccaggaggcgctgcgcatgctcgatctggtgcgtattccggaggctaaagaggtgctggggcgctacccgcaccagctttccggcggcatgcgccagcgggtgatgatcgccatggcgctctcctgcaagccggcgctgttgatcgccgatgagcccaccaccgccctcgacgtcaccattcaggcgcagatcctgcagctgatccgcgtgctgcaacaggagatgcagatgggggtgattttcatcactcacgacatgggggtggtggcggagattgctgaccgggtgctggtgatgcgccgcggtgagcaggtggagcaaaatcgggtgcgcgagctgttcgccacgccgcagcaggcctatacccgggcgctgctggcggcggtgccgaagctgggggcgatggccgatcggccgctgccggcgaagtttccgctgccgggaggcgaggaggatgaagcgccgcaggataccgtgccgccaggcgccgcgccgatcctgcgggtggatcatctggtcacgcgttttgatctgcgcggcgggctgttcaatcgggtcactcgccgggtgcacgcggtggaaaacgtcagtttcgatctttaccccggcgagacgctggggctggtgggcgagtccggctgcggcaagtccaccaccgggcgttctttgctgaaactggtggacagccagagcggcaccatcaccttcgccgggcggcgaatcgatcggttgaaggggccggcgctgcagcacctgcggcgcgatattcagttcatctttcaagatccttacgcttcgctcgatccgcgcctgacggtcggtttttccatcatggagccgctgctggtgcacaacgtgatgcgcggccgggaggcggaacggcgggtagcctggctgttggaacgcgtcggcctgttgccggaacacgcgcgccgctacccgcacgaattttccggcggccagcgccagcgtatctgcatcgcacgcgcgttggcgttgaacccgaaagtggtgatcgccgacgaggcggtttcggcgctggacgtgtcgattcaggcgcagatcgtcaatttgctgctcgatctgcagcgcgagttcggcatcgcttttctgtttatttcacacgacatggcggtggtggagcggatcagccaccgggtggcggtgatgtacctcgggcagatcgtcgagatcggcccgcggcaggcggtgttcgacaatccgcagcatccctacacccgcaagctgatggcggcggtgccggtggccgatcccgctcacgcccacaaacggcagccgctgccggccgatgagatcccgagcccggtgcgcgcgctgggcgatgaacccgttaccgcaccgctggtgcaggttggcgccgggcactttgtcgcccgccacccgatcgccggtgctttttaaagacctcaggagagacaagcgacatgaagcacacattcaaacgcaatgcgctgttggccgccgtactgctggcggcgggaaccggcccggtctgggcggcgaaggacgcggtgatcgccgtggcctccaacttcaccaccctcgatccttacgacgccaacgacacgctgtcgcaggcggtggccaagtctttctatcaggggctgttcggctttgataaggacatgaagctggtgaacgtgcttgcggacagctatgaggtcagcaaagacggcctgacctacaccgtcaaactgcgccagggcattaaattccacgacggcaccgcgttcaacgccgaggcggtgaaggtcaacctcgatcgcgccagcaacccggacagccacctcaagcgctacaacctgttcaagatgatcgacaaaaccgaagcggtggacgccaatacggtgaagatcgtgctgaaggcgccgttctcggcgttcgtcaacaatctggcgcacccggcggcggcgatcatctcgccggcggcgctgaagcaatacggcaaggagatcggtttccacccggtcggcaccgggccgtatcagttcgtgacctggaaccagaccgatttcgtcaaggtgaagaagttcgacggctactggcagccggggctgccgaagctcgacagcatcacctggcgcccggtggtggataacaacacccgcgcggcgatgctgcagaccggcgaggcgaccttcgccttcccgatcccttacgagcaggccaaggtgctggaaggcaacgccaagctggacgtggtggccgcgccgtcgatcttgcagcgttacatcagcatgaacgtcacccaaaagccgttcgacaacccgaaggtgcgccaggcgctgaactacgccatcaacaaggacgcgctgatcaaggtggcgttcgccggttacgcggtgccggcggaagggccggtgccgccggccatcgatttcgccgcccgctataagccgtggccgtacgatccggccaaggcgcgcgagctgctgaaagaggccggctacccgaacggcttcaccaccacgctgtggtcttcccacaaccacagcaccgcgcagaaagtgctgcagttcacccaacagcagctggcgcaggtgggggtgaaagtgacggtgacggcgatggatgctgggcagcgcgcggcgcaggtggagagcgtcggggtgaaagacaccggcgtgcggctgttctacaccggctggtcggcctcgaccggggaagcggactgggcgctgtcgccgctgttctccacccaggcggcgccgccgaagcagttcaacaccgcgttctacagcaatccgcaggtggacaaggatctgaccgacgcgctggcgaccaccgatcgcgccgagaagcagaaactgtatcaggacgcgcaggatcgtatctgggccgacgcgccctggatcttcctggcgaccgaacgcttgctgtcggccaacagcaaacagctgagcggtttctacgtgatgccggatacctcgttcaactttgataacgccgatctgaaataaggcgcccatccccgcctgcggccagacggcggcgggcgggggaaggaatgagatgctcaattattttctgaaacgactgctgggcctgatcccgacgctgctgatcgtggcggtgctggtgttcctgttcgtccacctgctgccgggcgatccggcgcggctggcggcggggccggaggccgacgaggcggtggtgcagctggtgcgcaaggatttggggctggataagccgctgccgcagcagttcgcgcactttttcgttaacgcgctgcggggtgacttcggcatctcgatggtgtccaagcgcccggtgagcgaagagatcgcctcgcgctttctgccgaccttctggctgaccgtcaccagcatgctgtgggcggtggcgttcggcctggcgatcggcgtggtgtctgcggtgtggcgcaatcgctggccggatcgcctcggcatgacgctggcggtgtcggggatctcgttcccggcctttgcgctcggcatgctgctgatgcaggtgttctcggtcgagctggggtggctgccgacggtgggcgccgacagctggcggcactacattctgccttcggtaaccctgggggcggcggtggcggcggtgatggcgcgcttcacccgcgcttcgttcgtcgaggtgctgcaggaagactacatgcgcaccgcccgagccaagggcgtgagagaaagcgtggtggtgatgaaacacggcctgcgcaatgcgatgatcccggtggtgaccatgatggggctgcagttcggcttcctgctcggcggttcgatcgtggtggagaaggtgttcaactggccggggctggggcgcttgctggtggactcggtggaaatgcgcgattacccggtgatccaggccgaggtgctgctgttctcgctggagttcatcctgatcaacctgctggtggatatgctgtacgcggcgatcaacccggcgattcgttaccaatgaggacgcggcatgattaagcattggcggcgcagcgccgcattgaaggcgatgccgcttattgaccccaacgcggtacgcacgccgtggggcgaattttggcggcgttttcgccgccagcgggcggcgctggtcgccggtctgttggtgctgctgctgattgcggcggcgctgctggcgccttatctggcgccgttcgatgcggaaaattacttcgattacgaccggctgaacgaagggccttcgctgatgcactggctgggggtggattccctcgggcgcgatatcttcagccgcatcctgatgggcacgcgcatttcgctggcggccggggtgttctcggtgctggcgggcggggcgatcggcaccttgctggggctgctggccggttactatgagggctggtgggatcgcctcaccatgcgcgtctgcgacgtgctgttcgcgtttcccggcatcctgctggcgatcggcgtggtggcgatcatgggcagcggcatggccaacgtgatcgtcgcggtggcgatcttcagcattccggcctttgcccgcctggtgcgcggcaacacgctggtgctgaagcacctgacctatatcgagtcggcgcgcagcatcggcgcctcggactggaccatcattctgcggcacattctgccgggcacgttgtcgtcgatcgtagtctatttcaccctgcgcatcggcacctcgatcatcaccgccgccagcctgtcgtttttggggctgggcgcccagccaccgacgccggagtggggggcgatgctcaacgaagcgcgcgccgatatggtgatcgcgccgcacgtggcgatcttccccagcctggcgatattcatcaccgtgctggcgttcaacctgttgggggacggattgcgcgacgcgctggatccgaagctgaaggggtgatgctttaacgtatggcgcacatttgaacgggctcacatgacctctcagtgctattatccgttcaataagccgtgttgtttgcacgaagatgagtgacagaggtgccgatgccagtaaaacaacgaacgacgcaaagtgtgaccatgacgctggaacgcagtttgttgagccgtgcgcgtgaggcggggattaatctcagcgcgacgctgactgctgctttagatgctgagttgcgtcagcatgagaggagaaaatggcaggaagaaaaccgagaggcacttgaagcgcttaaccgatttaatgatgagcatggttgctttagcgacgaatacaggacgttttagcgatgcaatttacggtgtatgcgaatagcgggaacagcgcggtttaccccctgctgcttgatgtgacgagcgatatcattgggcaattaaatcgccgagttgtgatccctttgttacccgttgaaaaatacccggggagtacgcgaccggagcgcttgatcccgttgatcagattgattgatgacaacgagtacgccgtgatgacatatgaaatggccagcatcccggttcgggctttgggggccgaattttgtgatgtttcccagtatcggagcaggataaaagccgccatcgactttcttcttgacggtatttgaagaaatccgggcggtttaaccgcccggatttttttatcagcggaacaggtgctcggcgtggaaacgcaggtgatcttccacgaaggtggcgatggtgaagtagctgtgatcgtaccccggctgaatgcgcagcgtcagcggccagtcgcgctggcgcgccagctcggccagccgcgccggctgcagctgatcggccaggaactggtcgtcgtcgccctgatcgataaggaccggcattttctccgcgccgctggccagcagatggcagctgtcgtactgcagccactggctctcgtcgctgcccagataggcggtgaacgccttgcggccccacggtacctggcacgggttgacgatcggcgcgaaggccgataccgagcggaagcgctgcgggttgcgaaacgccatcatcagcgcgccgtggccacccatcgagtggccgaagatcgactgacgatcgctgacgctgaagtgctgttcgatcagcgccggcagttcggcgctgatgtagtcgtacatgcggaagtgacgatcccacggcgcctgggtggcgttcaggtagaacccggcaccctggcccagatcgtagccttcgtcgttcggcacttcgtcgccgcgcgggctggtgtccggcatcaccagcaccaggcccagctcggcggcgatgcgctgcgcgccggctttcaacgtgaagttctcgtcgttgcaggtcagccccgacagccagtacagcaccggcggcgggttgtcatcgcgcggcggcggcaggtagatgctgaatgtcatgttgcaattcaggctctgcgccgcgtggcgataacgctgttgccagccgccgaacatgcggtgctcttcgagaagttccaatgacaacgtcatctctgcctcctggcttattggtcgaagtggatgacggaacggatcgatttgccttcgtgcatcaaatcgaacgcttcgttgatctgctccagccccatggtgtgggtgataaagtcgttcagcgcgaattcgccgtccagataacgctcgacgatgccaggcagctgcgaacggcccttgacgccgccgaatgccgagccgcgccagacgcggccggtgaccagctggaatggccgggtcgagatctcttcgccggcgcccgcgacgccgatgatcaccgattccccccagcccttgtggcagcattccagcgcggaacgcatcacgttgacgttgccgatgcactcgaaggagaagtcgacaccgccgtcggtcagctcgacgatcacctcctgaatcggtttgtcatagtctttcgggttgatcagatcggtagcgcccagcttgcgcgccagatcgaacttgctggtgttgatgtcgatgccgatgatgcggcccgcaccggccatctgcgcgccgatgatcgccgacaggccgatgccgcccaggccgaagatcgccacggtgtcgcccggttgcactttggcggtgttgatcaccgcgcccatgccggtagtgacgccgcagcccagcaggcacacttcctccaacggcgcttccttgttgattttcgccagtgaaatttccggcaccacggtgtattcggagaaggtggaggtgcccatgtagtggaagatcggcttgccgtccttgaagaagcgggtggtgccgtccggcatcaggcctttgccctgagtggcgcggatcgcttggcacaggttggtcttgccggatttacagaatttgcactcgccgcactccggggtgtagagcgggatcacgtggtcgccgaccgccacgctggtcacgccttcaccgaccgcttccaccacgccgccgccctcgtggccgaggatcgccgggaacacgccttccggatctttgccggacagggtgtaggcgtcggtgtgacaaacgccggtggcgacgatccgcaccagcacttcgcctttttgcggtggcatcagatcgacttcttcgatcttcagcggctggttcgggccccaggcaacggcggcgcgggttttgatcatctccatcatagtctcctcagtggttttcttttaaatcaggcgatatcgctaacgtctgataaatcgttgggggtgctttcatcaacagcggcggtttccgtctgttcaataatcaattctttcagcgcgcgcacgttcggcccgaacgcgtcgcggcgccacagcagccaggtggcggtgtcggccacgtccggcggcagggtatgaacccgaacccgctcatggcccggcagcaggctgagcaccgaatgcgggatcatcgccagcccggcgccgctggcgacgcaggccagcatggcgtgataggactggatctccatgatctgccccggccgcgcgccttcgcgcttgaaccaggcctccagccgcaggcggtaagagcagctggcgcgaaaggcgaacagcgtctcgccgttggcgtctttggcgctgtggatcggcgcgtgatcgagacaggagatcaccaccatatgttcaggataggcgatacagccgttcaactcgtcataaggcaccgggccgtcgaccagcgccgccgccagcgtgccggcgcgcacccgatcggcgatttcgccggaggtgccggtggtcagcgacagtgaaacctgcgagaagcgctggtgataagccgccaacagcgagggcaggcgggtggcggcggtgctctccatcgagccgagggcgaagttgcccgccggttcgccggcgtgggtgatgctcatcgcctcgtcgctcagcgccaggatgcggttggcgtagcacagaaagttatggcccatcggcgacaggcgcaggcgctgtttttcgcggataaacagatcggcgcccagctcctgctcgagctggcgcagccgggtggtcagattcgacggcacgcggtgcagctgctcggcggcgcgggcgaccgagccggtttccgctacgcagcagaacatgcgaagctgggtcagatccataatgttctcgtttcgtgatgaacttgattagtattattcagtttttgtgagtttaatactgcggcatgatactggcaactttcttttaaccttttggatgccgatatggctttacgtattgccttgagcgggtttgccgcgctgatcgtggcgatgggcattggccgcttcgctttcacccctcaggtgccgctgatgatcgcggaacatcagttcagcctgaccggtgccgggctggtggcggcgatcaactatttgggctacctgtgcggcgcctacgacgcgatgcgcgccacgcgccacgtcgagcggcgcctgtggctgggcgtatggggcgcgatggcgctgacgctactgtcggcgctggcgcaggatgaatggacgcacggcgcgctgcgcttcgtcatcggctgggccagcggctgggcgatggtgctggtggcggcctggaccaacgagcggttggcacactacggccggccggcgctgagcgcagcggtgttcgccgggccgggcgccggcatcttcctcagcggcatgctggcggtgggcatcaacgcgctggggctgacggcggcgcaggcctggttggtgtatggcgggctggcgctggtgctggtcggggggattagcgcctttctgccgcgcagcggcgagctgcatcgcccggacgtggccccggagccgctgctgctgacgccggcgctcaaacgcctggtgtggagctacagcctggccggctttggctacatcctgccggcgaccttcttgtcgcagatggcggcggcgcgctttcccgccagcctgttcgcgcagttcgtctggccggtgttcggcggcgcggcggtgctggggattgtcatcggcattctgacccgccatcggctgaccacccagacccggctggcgatcacgctgtggatacaggcgctcggcgtactgagcgccgaagtggtgccgggcgtggccggcctggcgctcggggcgttgctgaccggcggcggtttcctttgcgtggtgcagcttgctcttcagcacgggcgtgagctggcgccgcgtcatgcgcgttacatggccggattgctgaccaccggttatgcgattggccaactggtcgggccgatgctgtcggcgctgtcgaccgccttgacccatcggctggagccggcgctgtatgtggcggtggcggcgctgttggcggccggagggctggtggtgaataccccggcgcggcggttggcgcaaaaaacggcgactcggtgattaaaaaccatacaaaaagcgtggagacccgcagccggcctgattgtgctaaatgcgaagatttcacctctggatgaagtactatcactggataatcgccgcgctctcatctacagtgggggcaaaatcttgaccgggttcacgttatccaccacgaaaactctgccgtcacgagagcaagcaattcgccggccgcacgccctatcaggccgctggcgggttccgtccgcaggagaacaaatacatgacatcattaagtaaagaagccgcgctggtgcatgcggcactggaagagcgtggtctggagacaccgctgcgcggggaagtgctggatcgcgaaacgcgcaagcgtcgcatcaaagagcacatgaccgaaatcatgcagctgctgaatctcgatctgtctgacgacagcctggcggaaacgccgcatcgcatcgccaaaatgtatgtcgacgagatcttctccgggctggactacgccaacttcccgaaaatcaccgtcatcgagaacaagatgaaggtggatgagatggtgacggtgcgcgatatcacgctgaccagcacctgtgaacaccacttcgtgaccatcgacggcaaggctaccgtggcctatatcccgaaagactcggtgatcggcctgtcgaagatcaaccgcatcgtgcagttcttctcccagcgtccgcaggtgcaagagcgcctgacccagcagatcctggtggcgctgcagaccctgctcggcaccaataacgtggcggtatcgatcgatgcggtccattattgtgtcaaggcgcgcggtatccgcgacgcgaccagcgccaccaccactacctcgctgggggggctgttcaagtccagccagaatacccgccaggagttcctgcgtgcggtgcgtcaccaccaggggtgatggcgttgcggggcgacccgcaagacgacaacaggcgcctgcgggcgcctttttcatgagcggaagacagcgataaaaaatgaacagtcatcctctgccgcgcattgccacgctggactgcgtgcgcggcatcgccatcctcggcattttattgctgaacatcagcgccttcggcttgccgaaggccgcctacctcaatccggcctatctggggatgccgtcatcgcgcgatgcctggacctgggcgctgctggatctcttcgcccaggccaagttcctggcgatgttcgcgctgctgttcggtgccgggctgcaaatgctgctgcggcgcggcaaaagctggatccgcgcgcggctgtcgtggctggtgttgttcggcctcgcgcacgccatcttcctgtgggacggtgacattctgctggcctacgggctgatcggcctggtgtgctggcgcatgatccgcgaggccaaagaaaccttccaactgctgaaaaccggcgtcgtgctgtacctgatcggcgtggcggtgctgctgctgctcggttttgtctcgcacggtgagccgggcagcttctggcagccgggcgtggcggagttgcagtacgagaagttttggaagctgcagggcggtttcgaagcctggcgcagccgcgccgatctgctctcgtccagcctgctggccatcggcgcgcagtatggctgggagctggcggggctgatgctgttcggcgccgggctgatgcgcagcggctggctgcgcggcagctattcctccggctattacctgcggcaggcggcgtggctgttgccgctgtccgtgctgatccaactgccggcggtggcgctgcaatggcaggtgcactgggactatcgctggagcggtttcctgctgcaggtgccgcgcgagctgggcgcgccgctgcaggcgatgggctatctggcgctgtgttacggtttctggcccgcgctgtcgcgcctgcgcatcgcccgctggctgagccaggtggggcgtatggcgttaagcaactacctgctgcaaacgctgatctgcaccacgctgttttatcgctttggcctctatgagcagtttgaccggctgcagctgttggcgtttgtgccgctggtctggttggtcaacctggtcttttccgcactgtggctgcgttacttcgaacaggggccgatggaatggctgtggcgcaaattgacgcagatggccgccggcgaagcggaatccaaagcgctgaagtgagcgcccgtcggcaggttaaaaaaatgtatgtaaacgttttctttcctgtgacgtaattcacgcagagcagcgggccaatcggggtaggatagcgccaccggccactaccccgatttcaggatcccgcatgcctccagttcatccgatcactattcgcgacgtggcgaaacgcgccggggtctccgtagcgaccgtctcccgcgtgctgaaccacagcgcgctgaccagcaaagagacgcgcgagcaggtgctgcaggcggtggcggatctgggctatcgccccaatgccaacgcgcaggcgttggcgacccaaagcagcgatacgttgggcgtggtggtgatggacgtgtccgatccgttcttcggcgcgctggtgaaagcggtagacacggtggcgcagaaacaccacaagtatctgctgatcggcaacagctatcatcaggcggacaaagagcgccacgcgatcgaagtgctgatccgccagcgctgtaacgccctgattgttcacgccaaagccctgagcgacgccgagctgatcggttttctggagcaggtgccgggcatggtgctgatcaaccggattatccccggctatgagccgcgctgcgtcgggctggataacgtctgcggcgcagaaatggcgatgcgtcttttgctgtcgcagggccaccggcgcatcggctatctgggctccaatcacccgatcgaagacgggccgctgcgccagcagggctatgcgcaggcgatggccgccgccgggctggccacgcccgacaactggcgtgcctacggttcgccggatctgcagggcggcgaggcggcgatggtcgagctgctggggcgcaacttacagctgagcgcggtgttcgcctacaacgacgccatggccgccggcgctatggcggtgttgaaagaaaacggtatcacggtgccgcagcatttctcgctgatcggcttcgacgacatccccatcgcgcgttacaccagccccaaactcaccacggtgcgctacccgatcgtctcgatggccacgctggcgaccgagctggcattgcagggcgcagcaggcctggcggagccgcaggccgctcatctgttcatgccgacgctggtgcggcgccattctgtcgccccctggcaaagtgaggcgacggtcactctctgacgatttaatcttgtgtaaccgttttcaatctgtgagaaaattcacagaatattaacatcgcgccgtctatgctctaggcgttttccggcgcaaaggcccttgccgctgcaacctttatctcgcgctgacacagcatttctcggaaataacaagatccacggacgacaggtgttgagtggaaatcgccaggcctggggtgtacgcactgccggtgaccattggctcaaagacgagtaataccctacacagaaccggagactgacaatgaataagaaggttttcaccctggccgccatggccgctgccatgatgtttggcgccgcagcccatgctgatacccgtattggcgtcacgatttataaatacgacgacaacttcatgtcggtggtgcgtaaggcgatcgagaaagacgccaaggcttcaccggacgttaccctgttgatgaatgactcgcagaacgaccagtccaagcagaacgatcagatcgacgtgctgctggccaagggcgtgaaagcgctggcgatcaacctggtcgacccggccgctgcgccggtggttatcgataaggcgcgcgcaaacgatatcccggtggtgttctacaacaaagaaccttcccgcaaggcgctggacagctatgacaaggcatattacgtcggcaccgactccaaagaatccggcgtgatccagggcgaactgatcgccaaacactggcaagccaacccggcctgggatctgaataaagacggccagatccagttcgtgctgctgaagggcgagccgggccacccggatgccgaagcgcgcaccacctacgtggtgaaaacgctgaacgaaaaaggcatcaagacccagcagctgcagatggataccgcgatgtgggataccgcgcaggcgaaagacaagatggatgcctggctctccggcccgaacgccaacaagatcgaagtggtgatcgccaacaacgacgccatggcgatgggcgcggtggaagcgctgaaagcgcacaacaagaccagtattccggtgttcggcgtcgatgcgttgcctgaagcgctggcgctggtgaaatccggcgcgatggcgggcacggtgctgaacgacgccgacaaccaggcgaaggccaccttcgagctggcgaaaaacctggcggcgggcaagccggccaccgaaggcacccaatataaaatcgaaaataaagtcgtgcgtattccttacgtcggcgtagataaagacaacctgtctcagtttgttaaataagaattgagatcccgctaagaccccgcctgcggcgccaacaccagggataccgccggcggggatgtttacgactgcaagatcgttaagccaggtgtatttatggccgatagctcacgcgaatttttgctggaaatgacggatatctgtaagtcatttcccggcgtcaaagccttggacaatgtcaatttacgcgtccgtccgcactcgattcacgccctgatgggggagaacggcgcggggaaatcgacgttgttgaaatgcctgttcggcatttacaaaaaagacagcggcagcattgtatttcagggccgggaaatcgatttcaagagctcgaaggaagcgctggaacacggcgtttcgatggtgcatcaggagctgaacctggtgctgcaacgcaccgtgatggacaacatgtggctggggcgctacccgaccaaaggcctgttcgtcgatcaggacaagatgttcaaagacactcaggcgatcttcgacgagctggatattgacatcaacccgcgcgaaaaggtgggcaacctgtcggtgtcgcagatgcagatgatcgagattgccaaggcgttctcctatgacgccaagatcgtcatcatggatgaaccgacctcttcgctgacggagaaagaggtcaatcacctgttcaccatcatccgcaagctgaaagagcgcggctgcggcatcgtctatatctcgcacaagatggaggagatcttccagctgtgcgacgagataacggtgctgcgcgacggccagtggatcgccacccagccgctggaagggctggatatggacaagatcatcgccatgatggtcggccgctcgctgagccagcgtttccccgacaggcagaatacgccgggtgaggtgatcctcgaggtgaagaacctgacatcgctgcgccagccttcgatccgcgatgtgtccttcgatctgcatcagggcgagatcctcggcatcgccgggctggtgggcgccaaacgcaccgatatcgtcgagacgctgttcggcattcgcgagaaggtggcgggcaccatcaagctgcacggcaaggcgatcgacaaccacagcgccaacgaagcgatcaaccacggctttgcgctggtgaccgaagagcggcgatccaccgggatttacgcctacctcgacgtgggtttcaactcgttgatctccaatatccgcaattataaaaacaagctcggcctgctggataacgcgcggatgaagagcgacacccaatgggtgatcgacgccatgcgggtgaaaacgccggggcatcacacccatatcggctcgctgtccggcggcaatcagcagaaggtgatcatcggccgctggctgctgacgcagccggagatcctgatgctggatgaaccgacgcgcggcattgacgtgggcgccaagttcgagatctatcagctgatgaccgagctggcgaaaaagggcaaggggatcattatcgtctcgtccgaaatgccggagcttttggggatcaccgaccgcattttggtgatgagcaacggccaggttgcgggcatcgttaataccaagcagacctcgcagaatgaaatcttacgtctcgcctccctgcacctttaaggattcgaattatgaacgcgctaaataaaaaaaccttatttacctatttcaaggaaggcggcatttacgtggtgttgctggtgctgttggccatcatcatcattcaggacccgactttcctcagcctgatgaacctgagcaatatcctgacgcagtcttcggtgcgcatcatcatcgcgctgggcgtggcggggctgatcgttacccagggcaccgacctgtccgccgggcggcaggtggggctggcagcggtggtggcggccacgctgctgcaatcgatggataacgtcaacaaggtgttccctcacatggaaacctggtcgattcccctggtcatcttgctggtgtgtgcggtcggcgcggtgatcggcctggttaacggcctgattatcgcctatctcaacgtgacgccgttcatcaccaccttgggcaccatgatcatcgtctacggcatcaactcgctgtattacgattcggtcggcgcgtcgccggtcgcgggctttgatccgaagttttccacctttgcccaaggcttcttgcgcttcggcgattttaagctgtcgtatattaccttctacgcgctgattgccatcattttcgtctggatcctgtggaccaagacccgcttcggcaagaacatcttcgccatcggcggcaacccggaagcggccaaggtgtccggggtcaacgtgccgctgaacctgatcatgatctatgcgctgtccggcgtgttctacgccttcggcggcctgctggaagcggggcgtatcggcagcgccaccaataaccttggctttatgtatgagctggacgccatcgccgcctgcgtggtggggggcgtatccttcgccggcggcgtgggtacggtgtggggcgtggtgacaggggtgatcatctttaccgtcatcaactacggcctgacctatatcggcatcaacccgtactggcagtacatcatcaagggcagcatcatcatcttcgccgtggcgctggactcgttgaaatacgccaagaagaagtagagctaccgcagcacagacgacaaggccggcaaaatatgccggcctttctttttggggcattacccgtcagggctgtttggctttctgcttctcttctttcagcttgtgctccagctcaaccaactgttccggcgagacggcgggatagccctgggcgtcttccggcacggtgtgcatggcggagatcgggatcagcgggccgaggaagcgcggttcacgcttgaggatgtacagatcggtcagcgcgcccaggcgggcgaagatctcgcgggcgcgcaccgtcatcatgtccttcggcgacggcaccgcgtaacactgcgcctgaatgcccatgtgcagggcgatgaacagcgcgcgctcgcagtggaagcgctgggtgatgatgatgaaatcgttggtgtcgaacaccttgcgggtgcgcacgatggaatccagggtgcggaagccggcgtagtccagcacgatatcgctcggcgccacgccggcggcgatcagatcgcgccgcatggtcatcggttcgttatagctttgctgggcgttgtcgccgctcagcagcaggtatttcaccttgccgctgttataggcgttgatcgctccctgaatgcggtaacggtaatactggttgatcacgccggtgcggtaatacttggcggtgccgagcaccacgccgacctggcgatgcggcaattcctgcagttcgtcgtagacgtaaggcgcggttttccaactgatccagcgatcgagcgcaatagccgaacccatcaacaccgcaatgatgatgaacaggctgatgatcaggcgtttccacatgttgttgccttacgcgcgccgggctgaaaaagatggatcaaggctactttacctgaccgaccgacgcaagacgcgaaccgcctgaagcacgcgcgccgccgcatttttcggcggttttgccgcacaaaaaagcccggcggagccgggctgggtcatttcagctcaccattcagaacgaggtgcgcttgtaactgcggtactgcggccgccagaagttgtgctcgatggctttcgacagcgcatcttcggaggtgacgatcgccaccccctgcagctgggcggctttacccacttccatggcgatgcacttcgacacaccctgaatatcgtcgatattcggcagcagcgcgccgtggccgtcggtagccagcggcgaacagtccgccagtgcgcggctggcggccatcagcatggcgtcggtgacgcgagtggcgccggaggccagcacgcccagaccgatccccgggaagatgtaggagttattgcactgggcgatcgggtacagctgctctttgtagcttaccggcgcgaacgggctgccggtcgccaccagggcggcgccgtcggtccagttgatgatgtcttccggacgggcttccacgcgcgaggtcgggttggacagcggcatcacgatagggcgttcgcagtgcttgtgcatctcgcggatcagctcttcggtaaacagccccggctgaccggacacgccgatcagaatggtcggcttggcgttgcgcaccacgtccagcagcgagatggcgtcgctggcggtttcccagccggccaggttgtcgctcttctgcaccagcttgctctggaagtcgagcaggttcggcagtttgtcggtcaacaggccgaagcggtcaaccatgaatacgcgggcgcgcgcttcgtcttcgctcaacccctcggacttcatctgcgcgatgatctgctcggcgatgccgcagccggcggaaccggcgccgaggaaggtgacggtctgatcgcgcagctggctgccggcggcgcggctggcggcgatcaggctgccgagggtgaccgcggcggtgccctgaatgtcgtcgttaaagcagcagatctcgtcgcggtagcggttcagcaacggggtggcgttattctgcgcgaagtcttcaaactgcagcagcacgttcggccagcggcgtttgaccgcctgaataaactcttcgacaaaggcgtggtactcctcgccggagatgcgcggatggcgccagcccatgtacagcggatcgttgaggcgctgcgggttgttggtgccgacgtccagcaccaccggcagcgtgtaggccgggctgatgccgccgcaggcggtgtacagcgacagcttgccaattggaatccccatgccgccgatgccctgatcgcccaggccgagaatgcgttcgccgtcggtcaccacgatcaccttgacgttctgcttggtggcgttttgcagcatgtcatcgatgcgatcgcggttcgggtaggagatgaacagcccgcgcgcgcggcggtagatatcggagaagtgttcgcaggcctcgccgacggtcggggtgtagatgatcggcatcatctcgctcaggtgcgagtccagcaggcgatagaacagggtttcgttggtgtcctggatgttgcgcagatagatgtgcttatcgttatcgttcttgaaatcctgatactgacggtaggcgcgttccacctgttcttcgatggtctccaccgcttccggcagcagaccgtgcaggttgaagtggctacgttcttcctcggtgaaagcgctgcctttgttcagcagcggaaattccagcagaatcgggccggcgtaagggatatagagcgggcgtttgctttcgtattctagttccatcagttttactcttcacgtatcagataactttattgccgacgatcctaagagataaagagaagatgtacagcatttgttgccagatgatgaaccaggttggcgtaattatcgacaatcaaatgattttttaactaaagaaagtgtctctggcggcgtcggggcattgtatttggcgggcggggctgttaacggcggaaccggatggccccgccgtggcgcttagaaggcggcgcggctgacgttctggcagcccagcgccgccagggtggcgcgggtggcgtcccactggctgaggatcgccttctgcggttcggccagcacagcgcggcgaatgttctggcagtcgccgccggagaggttcagcaggatcagcgcagcctgtagcggtggcaggctcgggttgaaagcggcgttttccgcatagcggccggcgtagaggctgccgtcctgcgtttccagcgctacgccgctgtgggcgttgctgtacggagcatggctctgattggccgccgccagcgccgcctgcgccagcgcatcgtccagcgccagccggtggccgtgatcgaccttgtccatcagcagcgaagcgatatccagatctttcgggccgaaggcgtccggcagatagtccgccagcgtggccggcgcgcggcccggcagacggatctgcagctcgccaccgctgttcagttcattcataaactggcggcaatggccgcacggcgtgtagttgacggtgaccgaggccagcgccggctcgccgcgcagccaggcatgggtaaccgcgcactgctctgcatgcacggtttgctgcagcggcgcgccgctgaactccatattggcgccgaaatagaggttgccgctttgcccgcgcgcgatggcgccgacgtgaaagtgcgatatcggggttaacgagcaggccgccgccagcggcagcagcgcgaatgccagcgcatcatcgtccagcccgcagcctgtgcggatcgccgccgcttgctcggccgtgaacatcgccggaaagtctggcgcgtccagataaggccgcagggcggattgcagtgtcgcgggcagtgcgctgaaagcggtgtgaaaacgcggatgcatagaaagtctctctacgggttaacgggataacattctaggcaggccagagacattaaagtgtgattaatgtctcttaattgatgaaattaatgcaatgaaatacataaatgcgagatgtatcgcaagtttcaccctgttcagccgaacaggcgcagcagcaccgggaacaggaacggtgccagcagcgaggtgatgatgccgcagatcaccaacgccagcgagccgaaagcgccttcctggtagtccatctcggcgcagcgtgcggtgcccagcgcgtgggatgccgtgcccatcgccaggccgcgcgccgagtgggtggtgattttcaacaggttgaacaacgtatggccgaacacggcgccgaggataccgacgaaaatgacgcagactgcgctgatcgccggaatgccgccgagcgagtccgcgacggccatggcgatcggcgtagtgaccgatttcggcaggatagaggcggcgatttccggcgtggcgcccagccacagggcgatggcgccgccgctgatcatggcggtcaggctgccgatgaagcacaccgcgataatcgacttccagcgcgcgcggatctggtgcagctgctcatagagcgggaaggccagcgcgacgaccgccggctgcagcagatcgttgaggattttgctgccctgaaagtagcgttcatagggaataccggtgagcagcagcagcgggatgatcaccgccatggacaccagcagcgggttgagcagcggcatattcagcttgcgcgccagccagcgcgcggcgaaatagaccgccagcgtcagcggcaacgaccaccagatttcatggatcatgaattgccctccgtgtcgtcgggcttgccggcgatgcggcgctcgcgatgaaaatagtgtgaggtatagccgaccaccaccaacaccatcagcgtgctgatgaggcaagagataaccagcgggcccagatgcgcgacgatctggtcgtagtatttcatcaccccgacgccgatcggcacgaacagcagcaccatatagcggatcagcaaatggcagccgggtttaacccatttggccggcataatctgggtagagagcagggcgaacagcagcagcatgccaatgatgctgccgggaatggcgaacggcagcagcgccgccaccgcgttgccgacgaacagacacaggtagataaggagcagggccctcaggtatttccagcacagtgtgagcacgttggccattgtcttttcccgtttaactgatgtattcatcatacaattaaactgtgagccatgccacagatcgcaccatgaattctcgctatgggtgctatgcccgagcggcgggttgacagcccgtataggccgctgcctgcgggatcagcgcgcgtcttcggccgttgccgcagaacgttccgccagccggtggccgaggaagaaaaacagcaggctgagcagggcggcgacgatcagcatcacgaacatcaacggcggcgcggcatagctgagcagcaccccgcacagcaccgggttgatggcgccgcccagcgcgctgaggttttgtactccatagtaactgcctttcaggtgcggcggcgcaataaagtcgatgaacatgtattccaccgggataacgatgatctcgcctaaggtaaacaccgccatcgccgccagccacagccagaccgcctggccggccgccatgaaaccgagcagcccgacgatgaaaaacagcgtgcccagcaccagccagcgcagcatgttttcctggcgcatgccgcggctgagcaggtattgcagggcgatgacgatgccggcgttgacgatcatcaccaacccaatgattttgtaggcgaactcggcgctggagacggtgatcagatactgcgacagatagccggtgaactgaccgaacaccacggcgcccagggtgctgccgagggtgaagtagataagccgccgatcgtttcgcaagatggtcagcgtctgacggaagttggggagtgccgccggtgcggcggcggttgttgtcgggcgctgttcccggccgcgcaagcgcaggcttagcgccgtcaccgtcgccagcgccaatccccccgacaggtaaaacggcagcagcgggctaagcccggccaccagaacgccgagcgcagagccgatcgcccagccgacgttgaccagcgtgtagttgattgagaaagccttgatgcgctgctcgaccggcagccagtcggcgaagcaggcctttatggtgatgcttaacaccgaataacaggtatgcaggatcgccagcaccacgatcacgccgccggggcgcgggatccagggaatggcgaagaaactcagcgcgaacaataaaatcgacagcaggatcagacggtttttgctgaatttgtcaaccagatagccgccgtacaggctggcaaggatgccgagggtcaggctgacgcccaggatcacgcccacgctcttcggcagcagatggaaatgttcggtgaggtagatggtgatgaacggcagcgtaacgccgcggccgatggtcaacaccagcgaactggccagcagtacgttgatcagcgaggggaatcccttcatttgaggcctgtttatgcatacagttattgggcgatgcagataacatagcgcattttggcggggacggaaggggaaagccgataattagtttaaaaacagaggctgcgtcggcagcctcgtcaaaaacagcattatttaccgtgttcggcctgcagcgtggcgaaccatggctgaacgaaatcgctgctggtgccccagccggggatgatcttcgccagcccggcgacgttgaccggccccggctgcgccagcagcagcgcctgcggaatgaccgctgctttgaactgatagctgtccggcgtgctttccccggcgatcttgttggccaccaggcgcaggttgaccgcgccgatcagcttcggatccaccgccacgctgacttgccatgggctgccggcctcgcgcatcagctgcaaatcctggttggagatatcgatgctgtacagtttgatttcggtgcggccgttctctttcaacgccttgtaagcgccctgggtgaaagcgtcccaggtgccccagatggcgtcaatcttgcctttcgggtatttcgccagcaccgcacccactttattggcggtatctccctgcacgtcggatgaaaccgcgccaatcgattccagctcatgaatgcccggatgctgtttcagcaactgctggtaagcggcctggcggcgctccatcggcgggaagcctgccacccagagtttgatgatgttggcctggccgttgaaatccttcaccaactggccgaacgaggcgttggccagcgaagcgtcgtcctgctgcgagacggtgacgccgggaacgcggccgctgacgtcggtatcgaaagccgcgacggcgatgccggccgccgcgatgcgcttgaccaggtcggtggaatagggagcccgcccctgcgagagaatgatgccgtcatatttctggctgatagcctggttgacgaagtcctgaaaacgcgcgtcgtcgccgttgctgaggaaggtgtccaccttgaagcccagcttgcgcccttcctgaatggcgcccgccaaaaattgcgtggtgttgtcgtcggatcctaggttgcggatcaccgcgatgcgcaccggcccctgatgttgagcgatggcggccggcacggcggcgttttccgccgcctgcagcggcagggcagccagcagactgagggcgagcagcgaagtcttgaggtttttcaatattataggctccaaaaaagcagggaaacgatcccggtgaaggtctgttatagcagtctttctgtctggacgtctattttgggtttcggagcatcatagccggatgcggcgggcaggggaatcagggcggttatgactttttcttcatgcttataacgtggggattggggcataaaaaaagggccgagcaagctcgaccctccctatgccacgcatctgcgcgattacttgacctgcatgccaggctgcgcgccgctgtccgggctcagcaggaagatctctttcccgccggggcccgccgccatcaccatgccttctgacacgccgaagcgcattttacgcggcgccaggttggcgaccatgatggtcagacggccttccagcgctttcggatccgggtaagcggagcgaatgccggagaagatttggcgcgattcgccgcccagatccagctgcagcttcagcagcttgtcggagccctcgacaaagtcggcgctcttgatcagggcgatacgcatgtcgaccttggcgaagtcgtcgaaggtgatggtttcctggatcggatcgtcagccagcgggccggtcaccggcttggcggcggccatgtcttccttcgaggcattgaccatctcgttgaccttgtccagatcgatgcggttgaacagcgctttgaacgcgttcacctgatggcccagcagcggctgcgggatcgcgtcccagctcagctcggcattgaggaacgcttcggcgcgctcggtcagcgaaggcagcaccggcttcaggtaagtcatcagcacgcggaacaggttgatgcccattgaacagatggcctgcagatcggcgtcgcggccttcttccttcgccactacccacggtgcctgctcatccacgtaacggttggccagatcggccagcgccatgatttcgcggatcgcgcggctgaactcgcggccggcgtaggcttcggcgatgctctgcgccgcgtcgacgaaggtctggtacagcgccggatcggccaggctgtcggccagcttgccgccgaagcgcttgttgataaagccggcgttgcgtgacgccaggttcaccaccttgttgacgatgtcggcgttcacgcgctgcacgaagtcttccagattgagatcgatgtcatcaatgcgtgaagagagcttggcggcgtagtaataacgcaggcagtcggcgtccagatgctgcaggtaggtgccggccttgatgaaggtgccgcgcgattttgacatcttggcgccgttcaccgtcacgtagccgtgcacgaacaggttggtcggtttgcggaagttgctgccttccagcatcgccggccagaacaggctgtggaagtagacgatgtccttgccgataaagtggtacagctcggtggtggagtctttgcgccagaactcgtcgaagttcagatcgccgcgcttgtcgcacaggttcttgaaggagcccatgtagccgatcggcgcgtccagccagacgtagaagtatttgcccggcgcatccgggatttcgaagccgaagtaaggcgcatcgcgggagatgtcccactgctgcagaccggattcgaaccactcctgcatcttgtttgccacctgctcttgcagcgcgccggagcgcgtccacgcctgcagcatttcgctgaaggccggcagatcgaagaagaagtgctccgagtcgcgcatcaccggcgtcgcgccggaaaccacggacttcggatcgatcagttccgtcgggctgtaggtggcgccgcacacttcgcagttgtcaccgtactgatccggcgatttgcatttagggcaggtgcctttcacgaaacggtccggcaggaacatgcctttctccggatcgtacagctgagaaatggtgcggttcttgataaacccgttttctttcaagcggctgtaaatcagggtggacagctcacggttttcatcgctatgggtcgaatgatagttgtcatagctgatgccaaagccggcgaaatcctgttggtgctcctggctcatctccgcgatcatttcttccggtttaacgcccagttgctgcgctttcagcatgatcggcgtgccgtgcgcgtcgtccgcgcagatgaaatgcacttcgtggccgcgcattcgttggtaacgcacccagatatccgcctggatgtgctcgagcatgtggccgagatggatggaaccatttgcgtacggtagcgcgcacgtcaccaataattttttcgcgacttgagccatagtgagaacttgctttctgtaatgaataaaagggccttcgatgttaaccgatcgcgcccttcgctgctagggcggtttcttacaggttatacgcgccagccgccgcgcagttctggtatgcttagccggaagctacccattcaaaatcaaggagccgggatgaacgcaaaatcccctgagcagaccaaccccgaagttctgcgcgccctggtgaccggtgtactggccgcctttgaacacccgacgttgaaaaacaacctgactgcgctgaaggctattcatcactgcgcattattggacgacgtactgcatatcgaactgacgatgccgtttgcctggcagagcggttttgaagcgctgcaggcgagcgtcggccctgagctgttgcgcgtgaccggcgccgccgccatcgactggaagctgaaacacgatatcacgacgctgaaacgcgccaacggccaagccgggatcaaaggcgtgcgcaacatcatcgccgtcagctccggcaaaggcggggtggggaaatccagcaccgccgtcaatctggcgctggcgctggccgccgaaggcgccaaggtcggtattctggacgccgacatttacggcccgtcgatccccaatatgctgggcaccgaacatgagcggccgacttcgccggacgggcagcacatggcgccgatcatggcgcacggcctggcgaccaactccatcggttatctggtgaccgacgacaacgccatggtgtggcgcggcccgatggccagcaaggcgctgatgcagctgctgcaggatactctgtggccggatctggattacctggtgctggacatgccgccgggtaccggcgacatccagctgacgctgtcgcagaacattccggtgaccggtgcgctggtagtcaccacgccacaggatatcgccctgctggatgccgccaagggcatcgtgatgttcgagaaagtgcatgtgccggtgctgggcatcgtggaaaacatgagcgtgcacatctgcagtaactgcggccaccatgaaccgatctttggcaccggcggcgccgagaagttggtgcagaaatataacagccgtctgctggggcagatgccgctgcatatctcgctgcgcgaagatctggatcgcggtacgccgacggtgatcagccgtccggagagcgaattcgccgacatgtatcgtcaactggccggccgtgtggcggcgcagatgtattggcagggcgaagcgatcccgacggagattgccttccgcgcgctgtaatctatttgcggcagtgaaagaacccggcttaagcgccgggtttttttatcggataggggtaggcttgtgcaggtcggcacgggtataagggcgttcgatctgcgccagcgttttggcgatatgctccagcaatccctgggtgggggccggctgccgctgccccatcagcgccaacggcaaggccagtgcgatggcgaagtgtggccaggagagatgcgggcgcgttttgttccgctgcaaccgcaggaacagggcgctggccaggtagcctaaaatcagcccgctgatcacctcggataccgagtgcacgcgaattaccagccgcgaaacgccgatggcgaaaggcaatatccacccggtcagcaaagcgatgctacgtatcgggtgggaaaatcggccggtcaacgtccagagcagtggcggccagatgcaggccgcgagggcggaatgaccgctgaatccggtgaaatcatagcgctcgctgccgatgccccagcccataaaggccagtttggacaggcagaccaccccgccggtgaacccgaagatcagcgcccactgccaacccgccgcgcgggtggcgggagacatgagcagcaataaaaacagaatcagcgcgcagggcagcagcaacatgctgtcgccgaaaaaagtcagaaaataccaatccagcacatcaatctccgatgaaagggggcggggagcaaaagtcagcgccggggagtgtaacccgttacggtgcgttgccctagctgcgagattcttaaaatgccgcgtggccgtggtgtggcagcccgaattcgcccgccgccgcgcaatatcaatatacagtggcgcaatccccggcgactccctataattgtcgcgttttagttcccccccttcacactatgaaatcaggtctttaattttatgactgacaatccgcatcagtgcgtcattattggtatagctggcgcatctgcctccggaaaaagccttatcgccagcacgttgtaccgcgaactccgcgagcaagtcggcgatgagcacatcggcgttattccagaagacagttactataaagaccagactcacctgaccatggaagaacgggtcaaaaccaactatgaccacccgagcgccatggatcacaacctgctgttccagcatctgcagatgctgaaggccggtaaggcgatcgagctgccgctgtacagctacaccgaacacacgcgcaagaaagaaaccgtccacctggaacctaaaaaagtgatcattctggaagggatcttgctgctgacggatatccgtttgcgccaggagatgaacttctcgatcttcgtcgacacgccgctggatatctgcctgatgcgccgcatgaagcgcgacgtcaacgagcgcggccgctcgatggattcggtgatggcgcaataccagaagaccgtgcgcccgatgttcctgcagtttatcgaaccttccaaacaatacgccgatatcatcgttccgcgcggcggcaaaaaccgcatcgcgatcgatattctgaaagccaaaatcagccaattctttgaataatgccgcttaatggccggaaatgcgcatttccggccgacggccaactatttgcaccccggcgtagacctttcgcccgttgtgtggcaatttttgtttagttacgcgttttgatggagaagaaagacatgagactgtgcgaccgcgatatagaagcctggctggatagcgagaaactggtgatttcgccgcgcccgccgctcgaacgcatcaacggggccacagtagatgtccgtttgggcaatcagttccgcgtgttccgcggccataccgcgccgtttatcgatctcagcgggccgaaagatgaagtcagcgccgcgctggatcgcgtgatgagcgacgagattgtcctgccggaaggcgaggcgttcttccttcatcccggcgaactggccctggcggtgacgttcgaatccgtgacgctgccgaacgatctcgtgggttggctcgacggccgttcttctctggcgcgtctggggctgatggtgcacgtgaccgcgcaccggatcgatccgggctggcacgggcgcatcgtgctggagttttacaactccggcaagctgccgctggcgctgcggccggggatgctgattggcgccttgagctttgagccgttgtccggcccggcggcccggccatataacagccggcaggacgcaaaatatcgcgatcagcagggcgcagtagccagtcgaatcgacaaggactaacggcgcgagatgcaccgtcggtgtggcgctgacaagagggtggcatgagaagattactgacgacattggcgattttactggtggtcgtggtggcgggaatgtccgcgctggtactgctggtcaatccgaatgattttcgcggttacatggtcaaaaaggtcgagcagaagagcggctaccagctaacgcttgaaggcgacctgcgttggcatatctggccgcagctcagtattttggccgggcgcatgacgctgaccgcgccgggcgccaagacgccggtggtgagcgcggaaaacatgcgccttgacgtcaaactgttgccgctgctgtcgcatcagctgtttgtgaaacaggtgatgttgaaaaatgccgtcattcgcctcacgcccgacagtgaagagcactcgcaagtggacgccccgattgcgccggccggcagcggcgctgatgcggcagacacggcctggaagttcgacatcgataacttgcgcgtcgtggacagcttgctgatttggcagcgcgccgacaacgcgcaaatcaatgtccgggacatcaatcttaccctgcagcaaacggagaaacggcaggcgcagctggacatttccagccgggtcaaccgcgatcagcgcgacctggccttcagcatggcggccgatatcgatctgcagcagttcccgcaccagatcggcgccaaggtgacccagttcaattaccaattggtgggagcagatattccgaacggcggtattcaaggcgaggggaatgctcaggtggtctatcaacagacgccggcgcacattgccgtcacccagctgaacgtcagcgccaataacagccagttgaccggcgatatcagcgccagcctgggagcggtgcccggctatgtggtgaacctgaattcggctaatctcgatctcgacgcgctttccggttggcaatccagcaccaataccgccgaacagcccgccgtgaccgccgcgccggtgatcgccagccaggtcgacgatcggcagcagaacctggaagcgctgcgcgatttcaatgcacagttgaatctgcaggcggcgcagttgacctaccgcggtatgaacgttacccagttagccgtcgcggcagataatcaacgcggcctgctgacgctgcataaacttgccgggcaattggccggcggtgatttctctttgccgggatcgctcgacgcacgcggcaataaaccggtgataaacgtgcagccgaccctgaaccaggttgagctcggcgcggtgctcaaagccttcgagatgccgcagatgctgaccggaaaattcagcatgaaaggggatttgaccggcgatcgtctttcttcagagtcatttgagcaccgttggagcggtacggcgcagctggcgatgcaggatgcgcagctgcacggcctgaacattcagcaattgatccaacaggcggtggcgcgtaacgataacagcgtgcgcgggcaagacagctatcagcgctataccgaagtcaaaagcgtctcggcgcgggccagcctgagccaaggcactgtcaagctcagcagcctgacggcggattcgccgttgctggcgctgaccggcgccggcagtatcgatatgccgggaaaacagtgcgatatggcgcttaatgtgcgcgtcactggcggttggcaagggcgcggcgaactgatcgagcaactgcaaaaaacgccgattccgctgcgggtctatgggccttggcaacagctgaattaccaactgcaggtcgatcaggtgctgcgtaaaacgctgcacgatcgggccaaagatgcgctgaacaaatgggctgaaaagaacaaggattcacgcgagggtcaggatctgaaaaagctgctcgacaagctgtaatccctcctgacgcgggccgtcttgcggcccgcgtcagtatcgacgtttcccgcgataatttccctccgttaccttgatgaaggtcatgaagacccgcgctcaatttgtgcagagtaagggcgcattctgctatgactatgcgcctgagcgcgaaaaaatgacgagttgaggaaacatgatagagcttcttattggcgcggcggtggcggcgggcgtgggccgttacatcatcaaagggtattccgccacgggcgtcttgatggtgggagggctgctgctgctaggcatcagcgccctgatgggaaaaacgctgttgccgtccggcgccgcatctaccggctggcgcgcgaccgatatgatcgagtacgtcaagattttgctgatgagccgcggcggcgatctgggcatgatgatcatgatgctgtgcggtttcgccgcctatatgacgcatatcggcgccaacgacgtggtcgtcaagctggcctcgcgcccattgcagatgatcaattcgccttatttgctgatggtggcggcctattttgtcgcttgcctgatgtcattggcggtctcttccgctaccgggctcggcgtattgctgatggcgacgctgttcccattgatggtgaacgttggcattagccgcggcgccgcggcggccatttgcgcttcgccggcggcgattatcctggcgccgacttccggcgacgtggtactggcagccaaggcggcggaaatgccgctggtggacttcgcgttcaaaaccacgctgcctatctcgattgccgccatcgtctgcatggccgtggcgcactttttctggcagcgttatctcgataagaagagtgatgaacagcaccacattatggacgtcagcgagatcaaaacccatgcgccggggttctacgcgatattgccgtttacgccgatcctcggcgtgctgatcttcgacggcaaatggggcccggagctgcacattattaccgtgctggtagggtgcatactgttggcggcagcgatcgagtttgtgcgcagcttcagcgccaaacaggtattcagcggcctggaagtggcgtatcgcggtatggcggacgctttcgccagcgtggtgatgctgttggtggccgcgggtgtcttcgcgcaagggttgagcaccgtcggctttatcagcggcttgatcgggttggcgcagtcgttcggtaccggcggtttgatcatgatgctggtgttggtggtgatcaccatgctggcggccatgaccaccggctccggcaatgcgccgttctatgcgtttgtcgaactgatcccgaaactggcggcacagatgggcgtgaatcctgcctatctggtgatcccgatgctgcaggcctcgaatctcggccgcacgctgtcgccggtctccggcgtggtggtggcggtctccggtatggcgaaaatctcgccgtttgatgtggtgaagcgtacttcagtgccggtaattgtcgggttggtggtggtgatcgtggcgacggagctgctggttccccagtaaaaggaaggccgggcgatgcccggcctcgatgttaaacctcgtactcctccggtggaggaggcggggtgatcttcactttcaggatgcggtggctgttgacctccaatggttcgaacaggtagtcaccgatcttgatctgttctccttcttgcggcacgcgctgactgtgttccatcaacagccccgccagcgtgtggtattcgcgcttgtcttccagcggcatcggcaggtacagcaccagatcttccagcggcatatagccgttggcgatccagctgccgtcttcgttttgctgaatgtcatggcgtgcgtccacctcttcgccggcctccggcaggttgccggcgatagtttccatcacgtccgtcagggtgacgacgccttcgacggagccgaactcatcgaccacgaaggcgaaatgcgtctgcgcctggcggaattgctccagggcgcttaacagcgtgagctgctccgggaagatcaacggttggcgtatcagcgcacgcagatccagcggcgcctgcgccagttgctgtttgagaacgtcgatggtgtggatcacgcccagcggttcgtcgctggcgctgctttccaccaccacgatgcgcgtgtgctgattacgttccagcaactgcgtcagcttttcctgcggatcgttcagctcaaggtattcgacgtcgtgacgcgaggtcatgatgctactgaccgtgcgctgcgccatgccgagtacgcgttcgatcatgcgccgctcttgctgattgaagatctcgccgttttcgctgtcgctgtccgccagcaggttggcggaatggctgtcgacttccgcttcttcatgtttgccgctcagcatgcgcagcaccgcttcggcggtgcgttcacgtagtggccgcaccttcgacagaaagcgacggcggttgaactgcgccagctggttcagcgcttcgatcatgaccgagaagccgatcgccgcgtagaggtagcctttaggaatgtgatagccgaagccctccgccaccaggctaaagccaatcatcagcaggaagctcaggcacaggataacgatagtcgggtgcgcgttgacgaagcgcgtcagcggtttgctggccagcagcatcaggccgatggcgatacagaccgcgatcatcatcaccgccaggtgatcgaccatccccaccgcggtgatcaccgagtcgagcgagaaaacggcgtccagcaccacgatctgcgccacgaccggccagaaacgtgcgcctttgcgcgcgccgtgctgctcttcgtccttgccttccagccgctcattgagctccatggtggctttgaacagcaggaatatcccgccgaccaacatgatcagatcgcggccgctgaaggggtgctccgcgacgatgaacatcggtttggtcagcgtcgccagccacgagatggaggcgagcagcgccagacgcatgaccagcgccagcaacaaaccgacgacacgggccttatctctttgttgttttggtaatttgtccgccagaatggcgatgaagacaaggttgtctatacccagcacgatttccagcacgaccaaagtggccaggccggcccaaattgttggatcagcgatccattccatacgcccaatttcacctgtaagttctacggcttatgccgcacgggaatgatgggcgttgaggcggcaaaattcaactttaatcgggaggatgtggttcagaacaggaggattgccgtaaacatcgatcggcgccgagcggccaaaggaatcaagggcctggggagcaaatatctaccgggatgccatacgctcagaaaagaaacgccttattaaatttatttaaatcaaaacattaaaacaattttctttggctatgattcttatcggtatgtggcacgagtagtcttattctgaaaacggctgactggggggatctaaggcttgtatcacttagacattagtataagaatcttagtcatataacggcagtaactaacattgtttggttataaaggcaccgttttttttatttttttgtgaacagcatgacagttcaaacgaagaatgagtgccgctttgcataaaaattgcctggctcatgcaatgacgtggggggatacgccattaacagtactttggtagctgcaagccaagggcggtagcgtgcccgattgaatccccttgttcacgctgcacagatgaatgcagcgctacgatgaattggaatgaaaatgcaaacaagacttaaggcagtgatccccgttgcgggcctgggaacccgtatgttgccggcgaccaaggctatccctaaagaaatgttgcccgtggtcgataagcccttaatccagtatattgttgctgaatgcgtggcggcagggattaaagatatcgtattggtcacgcattcatcaaagaatgcgattgaaaaccattttgacacttcgtttgagctggaggcgatgcttgaagcgcgcgtgaagcgccagctcctggctgaagtgcaaagcatttgtccgccggatgtcaccgtgatgcaggtgcgtcaaggacaggcgaaagggctggggcatgcggtgctttgcgccaaaccaatggtgggtgattctcctttcgtggtgctgcttccggatgttttgctggatgatgcaacggcggatttacgcacagaaaatctggccaagatgcttcagcgtttcgacgagacgggatacagtcagattatggttgaacctgtgccggaacaagatgtgtccaaatacggtgtggtagattgcgcaggcgcgacgatcgcagcgggagaaagcgcaccgatgacggcggtggttgagaagccggcccgcgaggatgccccttccaacctggccgtcgtcggccggtatgtgcttgccgccgatatttggccgctacttgagaaaacccctcccggcgcgggtgatgagattcaactgaccgatgcgattgcgatgctgatggatgaacaaacggtggaagcgttccatatgagcggtaagtcccatgattgcggtgacaagcttggctatatgaaggcgtttgtgcagtatggggtgcgtcacggttccgaaggcgaaaacttcacccgctggttgaagcagacgttgggaaagtaacaggctgtcgccactgcggctgaaagcgatcacgagattgaatgaggtctaccatgacgaagttgaaagcggttattcccgttgccggattaggcatgcgtatgctgccggcgaccaaagcgattccgaaagagatgttgccaatcgttgataaaccgttgattcaatacattgtcaacgaatgcgtcgcggcggggattaaagagatcatcctggtgacgcattcttccaagaacgccattgaaaaccatttcgatacctcattcgagctggaggcgatgctggaggcacgcgtgaaacggcaactgctggatgaggtacagtcgataacgccaaaaggcgtaacgctgatgcacattcgccaggggcaaccaaaaggactgggacatgccgttctctgcgctaaaccgttggtcggtgattctccgtttgtcgttctgttgccggacatcttgctggatgatgcaaaagccgatttgaagaaagacaacctgtcacacatgattgcgcgctttgagcagaccggtctgagccaggttttggtgcaaaaggcagacgaacacgtgctgcatgattattccgtggttgagtgtgaggccagcaacctgaaacctggcgaaagtgcccgtatcacatcgattattgaaaaaccggcgccggaaaccaagttggaatccaactactctgcggtagggcgctatgtcttgtccgccgatatttggccgctgctggagaccacggaaccgggagcctgggggcgtattcaactgaccgatgcgattgcagaattgttgaaacgcaaaccggtagaggcgacagagctggtgggtgaatcgttcaactgcggtgaaaaactgggctaccttcgcgcttttgtcacttatgggttgcgtcacccaacccaaggcaaagctttccgtgaatgggctgaacggctagcgttttgaacaagactggatggtttcccaccggcccgaacacggcgagtaagtcaggatagtggttgaattttggggaatttcactgtctcattttttatattagtatacattcaatagcgggttgctgagttgccttggcgagtgatttttgttcgagcttgccaagctgctctgcaacatactgttattaatacaaattaaagccctaatcggccccggtatcgatttttcgccaatgcgaggcttctcagcttatttagcttaccaataatagctttgctcttatcaacggcagataaacgttatggaaaattgcaacagggcgcttattgagagacgacgcagcaagtgtcaggcattttgataaggttacagcgacgcagccacggttggctagcattgtagctttgcagatacatttacttgaaagtgatgataatttgatggcaaaacgacaattgaaagtgatatcgctattgatatcaatcagcgtaatcagtgggtgcacggtgtttcctggtcaacatttgaacactgtggggaaaaatactgtaaaacaggaagatagcgacttcaatattgatgacttggttaatgtttatcctgttacacccaagttaatccagaaattacgtcctaccaaagtggttgctcagcccaattcatcgctggaagcctccttgcgcaattacgagtatcgaattggcgttggcgatgtattaaacgttactgtttgggaccaccctgaactgactacgccggcagggcagtatcgcagcgccagtgataccggtaactgggttcaatctgatggcactattttttacccatatataggcaaagtgaaagttgtcggcaaaacagttggccaggtacgttcggaaataagcggccgcttggcgcagtatatcgaaagtcctcaggttgacgtcaatatcgcggctttccgttcacagaaaacgtatgtgaccggggaagtcaagacatcggggcaacaaccgatcactaacgtgccattaactgttctggatgccattaacgctgcaggagggctcagtgagaacgcggattggcgtaatatcgttctgacgcatgatggcaaagagcagcgtctctccttacagcaactgatgcagaacggtgacttgacccagaataggttgttgtatccaggcgatattctttacgtgccacggaatgatgacctaaaagtattcgtcatgggggaagttaaaaccccttcaacgctgaaaatggatcgtagtggtatgacgctgaccgaggccttagggaatactgaggggatcagccaaaccgctgctgacgcgacgggggtattcgttattcgccctcttcacggttcccaaggcaacaagctggcggatatatatcagttgaatatggctgatgcgacagcgatggttatggggtcagagttccacctacaaccttacgatattgtttatgtcactgcggcacctatcgttcgctggaatcgcgtaatgagccaactggccccgacgatagccagcttcaatgatcttacagaaggcgcgctgcgcgttcgtaattggccataggaatgaacgatgtttgattcaatcttggttgtttgcgtaggtaatatttgccgttctccaacgggagagcgattattgcagcgattggcgcatggaaaaaaaatagcctcagcaggaattggagctcttgtcggtaaacctgctgattctgtagctgttgaagtggctaatcagcataatttatcgcttgacggccatattgctacacaattaaccaaagaaatgtgccgagaatattcgcttatattagttatggaaaaagggcatattgatgctgtatgtcgtttggctcccgaagtaaggggtaaaacgatgctgtttgcccattggcttgggcagcgggaaattccagatccgtatggtaaaagccatgaggcttttgaatttgtataccgcttacttgctgatggcgctgaaaaatgggcgcaggcattaaatcgttaatcagagattacaatgactgaaaatacaaagatgaatactgctgcaaataatagcaatgatgagatcgatttaggtcgattgttaggtacattattagatcatcgttggttgattattggtgtaactgcattgtttgcggtagtcggggttgtgtattctctatttgcgaccccggtatatcaatctgacgcgttagtccaagtagaacagaacgctggtaattcgttactcaacaatcttacagaaatgttaccttccagccaaccaggttcctcgacagaaatcgaactgattcagtcgagattggtgacgggtaagacaattgatgatttgaatctagatacggttattgaacaaaagtattttccagttttcggccagggttgggcccgtttgatgggagaggtacctggagaaatagccttatcacgccttacgatacctgagtcatggaaaagtatcccattagaccttaaagtcactagtgataacacttatagcttaagtaatgatggggttgaaatattaaaaggaaaagttggtgagcttgcaagtggtaatggcgtatccctgctaattagtgggcttggtgccaagattggcactgagtttacaattgtacagcaaccaaagttggttgctattaatgatttgctcgcggttctgtcggtccaggataaaggaaaagatacgggggtattggcacttagtttgactggggccgacccaatattggtgcgtaaaaccctcgatagcatcactcgcaattatttactgcaaaacgttgagcgtaagtcggaagaagcagcaaaaagcttagagtttttaaaagaacaactccctgaagttcgtggagcattagatcttgcagaggataagctcaatcgttttaggcagcaaaatgattctgtcgacttatcgcttgaagctaaatctgtgctggacagtattgttgcggtagaagcacaattaaacgagttaacttttcgtgaagcagaaatttcaaagctgtatacccgtgaacaccctgcctaccgggctttgatggaaaaacgcgctacgcttgagcaagagaaaaatcgtctaaataagcgtgtaggaggtatgccaaaaacgcagcaagaaatcattcgtttaactagagatgtagatgctggcaaagaaatttacatgcaattactgaataaacagcaggagttaagcattaccaaagcaagtactgtaggtaatgtccgtattgtggatcctgcggttacacagccaaagcccgttaaacccagaaaattgcttattattttgttggcgacgttcttggggggaatgatttcagttgctattgtcttgttgaagacaatgttgcacaaaggaattgaaactccagagcagctagagcaagatggaattaacgtatatgcgagcattcctctttcagaatggcaacagaaaaaagatcgggagacgttgttatcttcaaaacgtaaatcaaatacacgttctaatagtctcttagctgtaggcaatccggccgacttggctattgaggctatccgaagcttgagaaccagtttgcactttgccatgttagagtcaaaaaataatgtactaatgatttctggtgcaagtccgaatattggtaaaacttttgtcagtataaatttagctgctgttattgcacaggccggacagcgtgtattagtaattgatgctgatatgcgtaaaggctattcacacaccttgttaggcgtaggttggcagaatggtctgtcagacatattgtcgcagcagacaacattcgaggaatcgattcgtaaaacagaaattgaaggtatggactttatccctcgtgggcaggttccacccaatccttctgagctattaatgcgaattcgtctcaaagagttaattgactgggcaagcaagaaatatgatatcgtattagtcgatacaccaccaatcttggcggtaactgatgctgctattattggccaccatgcaggaaccgctctcatgattgctcgcttcagcatgaatactgtgaaagaaatagagatcagtatgcggcgctttgaacagaatggcattgatattaaaggtgttatactgaatgcggtggagcgcagagcgagtagctattatggcggatatggctactatcaatatgagtaccgctcgaatgataaggcatagtcagcaccatatataattatgatgtcaggtgggattaagtcccacctgatatttttttaggaaaaaataaatcgttatctatagattagttatcttgtaaagaatattaaatacgggtgattagattatattttttcatgaaaaggtatttcgataatataaataatgctcttgtaatgctttataaaacgtaaactcttcccaaatgaaaatttacaagtacactttatttttggtcaaaaaataatgaaaatactaatagtcaatacaatatatgcaccatttaaagtcggtggagccgaggtttctgtacaactattagccgaggagttggtgaaaaatggacattcagtacttgtagtgactttgcatgataaggcgaataaagagaaggcgactataaatggtgtgaatgttcattacttgccacttaaaaatatttattggccattttccaacgatggtgagaaaaggaagaagtgggaaaaaatcgcttggcatattatcgataattataatttcaaaatggcaagattattttctgaggagcttgacagttttaaacccgatatagttcacactaataatatttgtggtttttcagtttcaatttggaaagagatcaaaaaaagagatattaaacttatccatacttctcgagattattatctttttcatccaagttctacattatattccagaaataaaaatataaatgtcaatgcactatctgttaagttgtggtccttttttaaacgttcagccagccacagagttgatacctatgttggcataagtgattttattaaaacgtttcacatcaacaatggtttcttcaaaagagatagcgctttttatatctataacgcggtgaatagacctgactatcaatcggacaaagggaataagactcgttttggattcatcggtcgattgacaagagataaagggtttgatgactactgcgagtttgcgagtaacaaccccgatgctgtttactatgcagccggtcgctttccgagtggcaaagaaggggatgaactaaaaagattggcagagaaaagtaatattaaattaatgggttttatatctattgatgagtttttctctcaggttgatgtggcctttttaccagtaaaatggcgagagccgtttggaagggtggtagttgaatgtgtatttgctaacaaaatagtgttgacaaatgcggttggtggtatttctgaattggctatgcttctcccaaacatttactttattgataaaggaaaggatgtgattgcagggtgtgctgtgaatgaagttacgaacgagcaacttacgatgttcagtcaggataaaataaccttagagtatctttcagtttatcttcacaccataagaaatggttctgttaattagtgatgaaacttatcgctaccaatttttgaaatatattggggtgctagatggactttcttatattacaagattcaatagttttctttttattcctagctattgcgcttatatattttctcattgttgccaaaaaaaatggcttcaatatatatacaataattttattttctatttatataatatgctcttactcatcatataatattatggtgaaaccgatacatgacttcaacatagcgataccacgaacggggatttatcatttcaaagttatcgggccattagctccgattgatattatattcttgctgctttttgctttcgtttttatgaaaaaaataatgacaaaaagcttgtttagttatcagattgtaaaaaactcggcggtaatatcaaaatatataactctccagggcgttctgttggctataatttccagcatgggatttgttgcctatattaaaaatggagggcaaggtgaggtaaacgatcaactaatttattgtagaggggtcatatattttctggtttcaatatttttatttcaaaaatcatgtgaaaatttgaaaggttttgatttttataaattgttcaaaatcttttgtgtcattgatgtgcttaatttaatgtccggttttatttccagcataatttttcatgactatgtatgggaacggtatggtgtaaaaataacaattattgatcaagataaggccacagcatattttgttatctacgcattgcttataacttcacttttattcaccaggccattaaaaaacaaagtgatttacatatcgaccctgcttattggcatttttatgttttacaatatgtacaaatttgttttctccttggcatttctctatattatttatgaattcttcatcaacgcaattcgaggtcgaatagcggtggtgaaaatgtcgctactaacagtaggcctagttgcagtaatgtctacagtattgatgctttcaaatagtaaggcaatgaatacgcgttcaacacaatttggtgactactgggagtatacaggtagtaaatttcctgctattgcattgggaattggctttggtgggcaatactattcgccatcagatactgatgatcagggggagataaagcaaatcgacgttgagaatggaactgctaactaccgtaaaagcatacaaactccgttcttgaatcaaatcaaaaatgcgggcttgataggtttcttcataactattttctttgctatctttgctgtcatatatatggctaagattaatatctccttacctgttaatattctttataacgctatatgctttaatataatgtggtttatgtgtagtggcagcattatgcttcaaccgacaccaatagcaatagttactgtctccaagttattattgttgttctacttgttgcgagaaagagaaaaaaacaataatgccacagttaaagtttagccattattacaaatggggtttttatgctttacataaatggtaggttcttgactcaagaaatgactggtgtgcagcgttttgctgaggaaataactcgccagttgaataaagtaagagatgatgtggtggttctagcgccagaaggcgttttgaataagtcattatttagtgagtttaatattgaggttgtacaaggaaaaaaaggtcattactgggagcaaatcgatctccctcgagctctaaggaaaaaaggtgggcccttattattgaatttgtgcagtaccgcccccgctttttataagaatcaaattgtcactcatcatgatgtgacatacaaacgctaccctgatagtttttctaagaaatttagatttgtatatggtcttcttgttccgataatgttgaagaatagtcgacatttgcttactgtcagtgagttttctaagagggaaattcatgatttctttggctaccctacggagaatatctcagttatttataatgcggtaaataactcattttcaaagacagaagagaaagatataacgaggggtgattacttgcttgctgtctcctctcctaattaccataaaaatttccatggtatgctatcggcatttgaatctgtatcagagaagtatgaaatatcacttaaaataattgggaaaacggcggtgagcttttctcaacaggatttctcaaaactgatatccaatactgataaagtggaatttatggggagggtcgacgataaaacccttatacagctttatcaaaatgcggtggcttttgtttttccatcatattatgaagggtttggaattccaccgttagaggctcaatcttgtggttgtccagttatatcatcaaatgctgcatctatgcctgaagttttgcaggatagcgtgatatatttcgatccgaataatacggaagcgatttctgatgccatgataaaaataatcactgacaataaattgagggctgagctctcgcgaaaaggtaatgataacgtgaaacgtttttcttggcattcctcggcggagaagattagtaaaatagttgatgattttcaaaatgacgggttgtcatctaaatgaaagtattacatgcagcggaaacaataaaaggtggcgttgccactgtaatgcgccaacttgtggcagggcagattaacgacgaatctattgatgttagatgcattgttccttctgagcaagtgtctgaattgggtgtaggtaaagaaaacatcatcgttttctctcgctctggcagagatatttattcattttttattttcttccttacattcactaaaactattatttcgtttaaaccggacttggtacatcttcatagtacattctctggttttatggggagggttgcgctttatttattgtggccattttaccgacccaaagtaatttattgccctcatgctttttcatttatgatgaagggtggggcaaaaaaattaaaactgtatgcagcacttgagcgtgctctttcgcctatcacagatgtcattatttgtgtgagccagtatgagaaaagctgcgcaattgaatacggcttatcagaaagaaaactgaaagttgttcataatggtgttccggataaactaccatctggaccaactgctaatccctttgagcctgatgtgattaatgctattttcgttggaaggtttgattatcagaaggggttcgatattttgcttgacgccatgaccagagttaagggggaagcaatttttttgactgccatcggtagtgctgttcatggcaaggataatccaagagaaatgatgcaaacatcatatacgggatggctcagcagtgatgagttagcaccgtatcttattaatgcagatgtattagtaatgcctagtcgctgggagggcttcgctatggtagcgttagaagcaatgagctatggcctgcctgtgttagcgagcaattgtagttcatttcctgaaatgattgaagatggccatactggaattctattcgaggctgaaaactcaaaagatttggctaattatcttaggaatacatctaaagatcagtgggctaaaatgggagagaatgctagaaaggtttttctcaaaaactatacctcagtgaaaatgtgtagagatacgctatctatctacaactctttggctgctgagacgcagcgataaatgttctattggatatgatttatttatttttctgtgtgagtaaaagtataagtcaactctatgctaattacttttttggtgtgctgacacttttaaaatgttatggatgtcaacttcatgaaagaaaattataactcttcgctatttcataaaataatattccttgggcgaatctcatgagtatggaaaaagggtctatggcaaattatattactaagttatctttggcattgtctgatatttttttatttaatgtttcagtatatctttcctaccttattatttataatgtttttggtggcatagaggagttcattccgaaagatgaatttgctgttagggctgcagctcaatttattctttctgttttgtgtgttatttggttttggactagactccgtcattatacatatagaaaaccattttggtttgagctaaaagaaatcgtcagaacactcattatttttgctattttagatttggcgctagttgctttctcaaaatggaatttctcacgttatgtatggattatatcttgggcgttgattatttttcttgttcctttaggcagatcattaacaaaaagaatgcttaacaagttcaacctctggaagaagcacacaataataatcggtactggaaaaaacgcatttgaagcttacgctgcactacaaagtgaagaggttctcgggttcgaggttgcagcctttgtatgctcagatgactcttgtgctgaaaacaaatttaacattcctattattagggatgagcgagagctatggaagtgttctgatgttgagagcactcaattcattattgcgcttgaatttgagcagcatgcattacgggattggtggttaaagaatttggtgaaacataattgccgttcagtttctgtcattccaacactacgaggtgttccattatatgggactgatatgtcattcatctttagccatgaagtgatgatcttgcgtgtcagtaataatcttgctaagcgttcatcaaggttgttaaagagggtgtttgatatagtaggatctctttctattatcgttgccttaatgcctatattgatttttttggcttacaaagtatcgcgagacggtgggaaggcaatctatggacatgagcgcattggatataatggaaagaagtttaagtgcttaaaatttcgttcaatggtaactaactcacaagaggtcctcagtgagttacttgaaagagatccagcggctcgcgaggagtggaacaaggattttaaactcaaaaatgatcctcgaattactaaaattggtgcgtttatacgtaaaactagccttgatgaattaccacaactctggaatgtcttagtaggtgaaatgagcttggttggcccaagacctgttgtagaggctgagcttgaacgatatgcaggtgatgttgactattatcttatggctaagcctggcatgacgggattatggcaagtcagtgggcgcaatgatattgattatgatactcgtgtttatttcgatgcttggtatgtaaaaaattgggctctatggaacgatatcgctatcttgtttaaaactatttcagttgttttgaaacgggatggagcttattaacttttgagtgttggatgataaggggggaggatggagaggcgagaacttgtaaaaagcatgctgcttgcggcggctggtgcttctgtagctggtatatcttcaagtgctgaaagcagtggtgaggccacttctaactctgtaggttttgataagctgcgccctggctcatttaagaatgatggggctaaaacgataaagttaagccccgaaatgttttttaatgggaggagtttggatagcaccaatcaatcgctgacagaagttaatatgcagatacagcgagatagctatgatagttttgataaaatgctacagcaagctagagttctctcatcgaataatatcgttgaaattacattgggagggtattatagagtaagtaaaggtaacttcgagttgccatccaattgtcatattatcggaggagggacagtatttttagataatgaggaaagtgatcaggctgtttttaaggttgagaataaacagaactttattttaaaggacatcacaatatcttcatcaaaaaccaccgatttgtgggggaaaacatgcaatggcattgaaattagagggtgttcaaattttgaacttagcggtttaaacataagctaccgtacagatgcaatatcaatatcagattcatctcattttagagtggagaattgtcttgttcataagttaggcgaagagggaattgctattcgtgcctgcttctcatggcttgtttttaacaatgacatatatgagcataatggtgacggtatccttctgaaaacaagtgggtccccatcatatgatgggaaaatcatttgtaataggatattttccgctacagatgcctttggtttaaaaggaactctggggggaggtattactcttaacgatgagaaaactggatccagtactacttttagcaatcttttagtgagcggtaactctattagtaatacctcttatggtattgcttttactaatattcaaaatctgaaagtagttgcaaatgatattgatacggtagttcgatttggcattatcgtcgataatgcccttcacaataacccacagcaatacccaattaaaaaaacgattgtctctggcaatacggtgaaaaatacgggccaagccggggtggcattctttagtgcaaatggtatcgatgttcagaataccattatatctgataatattttagaaaggtgtgggttgcaagagagtggagattatccagctatttcttctactaatgcgacaatatcagctaatcgtattagcgatagccgtactttacttaacgctatggatagcatcattaatgctaacttttttggaagcagtttaaaaaaaacagcaggtgaaaacattgctgattttaagctcggaggctccataaattttataggtaatatcattgaaaataaagggatggggcatattcggcttttagatatttccaatctggtttttattggaaatcaagtggagctaagctcgtcattctctgttttccatctggcatcggcaccttcaggagcagtattgattaaaaataatcatattcaatcacccgctacgaatgttttcactggtatgatgacagcagcacatatggttgatacggatttttcttcgtttggaaataaagtgtgtttatttggtgttcccaaatatggtgagtttaaagccggtgatagagccatacagcgctgtcctgaaccaggtatgccctctgaatgggtatgcattgaaagtggttcaccgggtatttggagtattgagaagtttgccaacataagttgtcgcagtactcctcaaaaaatcaatttggctcctagtgaaaaagcaatcatcaaaagtgtcgctttaggtgctaagtctgggtgggcgatcaattcgttagggtgttcactacctctgatgcaagcctcgctgaatgcttctttagatgaagatggtgttgttaccattacagtaagaaatattggtgatgctcacttgaatgtagaaaaagtcattttcaatgttgtgatcaatagggggtattagtcgtggtgagttcttgtttttatgaactgaagacacttagcccattttactttcgctttacttctcctttggtgtctgtatttttctgcattccttctacttgcatttctatctttacttcatagtaattactctttttattccatgatctattggagtttcctggttgattttttgtatgagcatatttagggatgcacacatatatatcttggtaaaccgtaccatgcatatttagatgtcttccgacatgctgattatgtcccttgaggagttcaccatgcttacccctccgatacgtcgaacacaagagcatcgccgttttttattctatcagacccggtatttctgcactcagttattacaagctgaaagctaagttcgtcggtatcgaatcctttgatatcaaaaatatgaaagatatctagggcgaaaaccgtcagttgaaacagatgttttcgaacctgagcttcgagaacctcatactgaaaatgtattatttgttaaaaacgttgaaataagtgataaagcgtggattttaaaatttttcaggtgattagcatgccgaggcgtccctggaaccatggaagcgttcatcatatctaccatctaccatctaccatctaccatctaccatctaccatctaccatctaccatctaccatctaccatctaccatctaccatctaccatctaccatctaccatctaccatctaccatctaccatctaccatctaccatctaccatctaccatctaccatctaccatctaccatctaccatctaccatctaccatctaccatctaccatctaccatctaccatctaccatctaccatctaccatctaccatctaccatctaccatctaccatctaccatctaccatctaccatctaccatctaccatctaccatctaccatctaccatctaccatctaccatctaccatctaccatctaccatctgccatctgccatctgccatctgccatctgccatctgccatctgccatctgccatctgccatctaccatctaccatctaccatctaccatctaccatctaccatctaccatctaccatctaccatctaccatctaccatctaccatctaccatctaccatctaccatctaccatctaccatctaccatctaccatctaccatctaccatctaccatctaccatctaccatctaccatctaccatctaccatctaccatctaccatctaccatctaccatctaccatctaccatctaccatctaccatctaccatctaccatctgccatctgccatctgccatctgccatctgccatctgccatctgccatctgccatctgccatctgccatctgcttaagctctatttttgcctcattggtaaacaacatctaccggtgcgtaattccgtactgcacgcgacctttcatcatcgaaccagacctgtcccatcgattttatgcatgatgtgctgaccgcggcagacgattccggactttcgacgtgatggatagttttaaccgtgaagtactggcaatagaaattctcctgaatggtccgaaaacgaggcaagtagccgcgaatagcgatacttgttcatgactctgagtgaagcacgctaatcacaacgcgctggtttacgaaataaaacactgagcagcctcattaatccctgagtaacccggcataggaaaagtactggctgatggtgaaaagtccgtaaattacaaaaagttcgtaaaactaaaccggtatgtttacttacttgcttaatgcacttaacaatagtttcgggttttgtgagagccaacaccatgttacgtatttaaactaaaatcaactgtgcaagtgatatccgttcaggtttcttactcgaggctcaatgataaccttggctccagagtgggtatgttatggcttaattgtatgatgtttaaaggaagtcctattttatttgcttttgtatttaattatatatttgttttttatgtgattttaatttggttctgaccttccctttgattttcttgtgtaagtggcctgacttggtgattttgggtggtttttaattttaatttttaaaatccattaaaattcaacctgatgtgatttttttatatttaaataaaaaaaatcctactccttgacaagggtctgtttatggcctttctttagtatgtgtcgctatggttctgtacggttagggggtaaagcaatctttaagttagttagagtattagtagttatgaggttcttataacttcctgtttccctcatcttcttgattaataaagggacaggttttgcttaatcaaaaatctacctcgaaggaggtttttatggcttctctggcgtttcaaaaagaggcggctgcagttatgtatgccgttctggggcaaagtgcgtcaagttcaacttatgatagtgttggcgcacagttagaaacaggcagcctttcagctggcagttatgtaacaagtttgctgacctcctctgctggtgtggcgttatatgcgggcaaaacggatttagatattctgcaggcggtgtacactaaagcgtatggaagtgcggctccagttgcaacacttcaggctttgctggcatcttctacgcttgccgactcgatttctacagtggttttaaatatcattaattatcatggatttgactccgcaacaacgacatcgcagcttaacttcgattcacaaattaataaaattttatatccagcaaccagtccggcagcggctgctggtccgggtgcatcggatgttcaggccatatatcatgtattgggtctgatatctcaatcgagcaatgttaatttattcggttcacttatcaactcagggaccaaaacgcttgttcaggttgctgataaattcgtagctgatcgctcctatttgacgtctttgaataacaatgacttcttggttcgcgtcttcgcagctagttatgagcgtgcaccatcctcgaccgagctttcgcactatttaggggaactgactggtggaagttctcgaggtcaaattgttgcggaaatcatcactgcgcttcgtgggtcggtcgctcctacagattctgttgcgcagcagcattttaatgatgcgacggttatctatgcgcaaggtcaaatcggtggtcttgcagctcaggaacaggctgcagcagtatatttggcagttcctgagcgcggtattgatgccggtgcgttggataattggagtaaatacctttcattaagcacgacgacatacaaagggtttataagtaatctactgacgtctgatgagttccaacgtaaaggtgcacagctgactggtgataactttatccaacatgtttacaccgctgttcacggtactgcagctacggctgctcagctggcgctttacagtgctttggggactgataaatcggttattacccaggccatcattaatgacctgcggacttcaacggctactgacgcggttaccgtcactcagcagcacgcatttgagtttgatatcggtaccagcctgttgtacaaaaccgcggctagcctgacgactacagccgccggcggtaacgcaaccggcaccgtcaacaccggcgcgtcccaccaaattagtaatgccgaaacggcagttttaacggatgtccaactgaacgccaatgccgccagcaccgtgaacctgaagttcgccgaccatctggcgaatctgactatcaacggcaccagcgcagcaacggtcaacctgtctgacaatggggttaatccaggcgtagatattaccgtcaataacggcaacgtcatcctgaatgccagttcgggtgcggatgacgtagtcgtcacatcgacggcaaacattgcggccggcacggcgcagtttaaccttggtgccggcaatgatagcctgcactgggcagggaacggcgtttccggcggagctaacactgtcgccaacaccgtcaaggctgacggcggcacggggacggactccatttccgccaacttcatcaccaaaaccgtggtgaccaaccaaaacgccctgggcgttcgcaccagtactgtgaccagcaacgccaataacttctcgaatttcgagaagatcgacctgaccggctatatcggcaagtctgttggtacgctgattacgactccgctgatcggttcaccgaccaccaccagcgtcacaacaccgacccacacctttgactttggcctgaccaacggtacatccacggttgaaggcaccacgggcggcacggttacgcagaacgcagctgccaccaatctgggcacgcaaggatttgtgatctccggtttggctaacgtcaacgtcatcaacgccgccggcggcaacgccgcgcagctggaagtgaaaggggacgcgacctccgccagtacgctgaacttcaccttcgtgcagaacgctaccgatcacttcaatatcaacttcgatgcggtgagttccgccaatgtgaatgccggtgctatcaccctgaacagcagcagcagcgccctgttgggtaccgcgctgagcacggtgaatgtggcctcaggcggtactggcagctttgataacattctgtcattggctggcaccaatgcgcaggttcagaccatcaacgtgaccggtgatcacgcgctggatctgaccctgggcagcggtttcagcaacgtgcgtgatatcaatgcgtccaccaataccgctggtctgaatctcgactccagccatggcggtaccggtgacggtatcatcgttcagttgctgaacattctgccgctgagcgtcgtcaccaccaacctgttggcgccagtgttgacggcgttgggcctgaacggttaccaaatgaccgtggaaggttccagtgctgccgataccctgggcgtgattggcaacaccacgctgaccggtggcgcaggtgccaacacctatgacatcaaggcgagtaacacgcaggcgggtgtgaccatcaaggactttagcagcctcaaagacaagattgtcgatgttaaccatggcggcctgactatctccaatgacgccagcggcacagcggttgcggactacggcacacgttccgcagacacattggatgcgctgttggggactctggtgggcggtttgaccaacggcgttatcggcctgctgggcggcattctcggtctggacagcagcaactcgctgacgtcgaaagtgggtgtggcatccgtagtattcagcggtggcggtaatactgccagctcttatgtgattatcgacaacaacgataaccatgcgctggatctcaacgataccgtggtatacctgaccgggcagaaccaccagcaattggtggatactctgcactacgcgtaagtaggggttccagcgggaaataattcccattgaaactgttagccaataaataatacggggtgtgtgaacaccccgtattctttgaattttgtgaaccacgtcattatctctggtttattccctttcgtactaaactcgctttgccctgtctactatttaccctactgttttcatttgtttttttctgtggttcgtgaggcgattttttttgcttacggccttgctgatatccgctttctctacctatagttagaaaaagtatctgcagtctcgagcatgtctggggtgggggttctttaggatttattttatttttttcctttttaggattttccttataagagtccaatgcggattttgactgacagtgcacatgatgtaagggcagaaagtgaatcaatttataccgcgcaatgaaattgcggatgttatacggactcgcagtaaggttttttggaccgttggcatattcaccgcatttattaatctattaatgttagttccttctatctatatgctccaggtttatgaccgggtgcttccttcgcgtaatgaaatcacgttgttaatgctgacgctgatcatgctgggcatgttcggcatgatgtcgctgttggaatacgtgcgcagcatggtggtgatccgtatcggcagtcagctggatatgcgtctcaacacgcgagtctacactgcggcctacgaggcgaatctgaaaaacggttcgtctgacgccggccagatgctgagcgacttgaccaatctgcgccaattccttaccggcagcgcgctgttcgctttctttgatgcgccgtggtttccgatctatctgttggtgatattcctctttaacccttggttggggcttttcgccctggtcggtgcgctgttgctgatcgcattggcggtgatcaacgaaatggtgtcgaaaaagccgctggcggaggccagcaagctgtcgattatgtccggtacgctggccagcaccaatctgcgaaatgccgaagtgatcgaggctttggggatgttgcctaacctgaaacgccggtggttcggtctgcaccagcggtttttgaacagtcagcgcatcgccagcgaacgcgcatcgcgggttacatcgatcaccaagtttgtgcgcatgtcgctgcaatcgctggtgctggggctggggggctggctggcgatcgatgggcacattacgcccggtatgatgatcgccggctccattctgatggggcgaacgctggcgccgattgagcaggttattaacgtctggaagagctacagcgcggcgaagctttcttatggccgattggtcaagctgctggaaacgcacccgcaacgtggtaccggtatgtccttgccgcgtccggaaggggtactcgcagtagaaggcgtcaccgccacgccgccgggctccaaaggcgatgcggtattgcataacgtgagttttgccatccagcccggtgacgtgctggggatcattggcccgagcgcgtcggggaaatcgacgctggcgcgtttgctggtcggcatttggccggtcagtgaagggattgttcggttggataatgccgacatctatcagtggaacaaggatgaattggggccgtatatcggctatctgccgcaggacattgagctgtttgccgggactatcgccgagaatatcgctcgctttaacgatatcgactcagagaaagtcattgaagccgctaagctggccggcgtgcacgaactgatcctgcgtttccctaacggttacgattcggtgctcggcaacggcggcgctgggttgtccggtggacagaaacagcgtatcggcctggcgcgcgccttgtacggcgatccttcgctggtggtattggatgagcctaactccaatctggatgatgcgggcgagaaagcgttgaaccaggcgattatgttcctcaagcaacgtaataaaacggtggttctgattacccatcgcaccaatttgctgtcgatgaccagcaagttgttgctgttggtgaatggcaacgtcaacgcgttcggctcgactcaacaagtgctccaggcgttggccaatgcgcaaaaagcccagacgcaacagcctcagcaagcggtgagggcggtaaattctgagccggatgaaggcaacatcccaaaaacgcaaattaattaagccgtgaattgcctgatggctttattgccatccgcagtttaaaggagttggtatgtcgacgcatattggcgagccgcaagactcgtatattgaagagatcccgcaggacgaacggcggtttacccggatgggctggctggtagtgggaattggtctgttcggatttttggtctgggcagcgttcgcccctctggataaaggggtggcatcaccgggatcggtaaccgtttccggcaaccgcaaaacggtgcaggccccggccagcggcatcatcaagaatatcgcggtgaaagacggcgacaaggtgaaagccggtgaggttctggtgcaattgagccaggtgcaggcacaggctcaggttgattcgctgcgcgatcagtactacaccacgctggccaccgaagggcgtttactggctgaacgcgatggtctgagcaaggtcactttttcccctgttttcacccaggttaaggatcagccgcgcgtggcagaaatcatcgcgttgcaaacgcagctgttcgcctctcgccgccaggggctgcaaagtgaaattgacggttataagcagtcgatggatgggatccgcttccagttgaaaggcctgcaggattcgcgcgccaacaagcagatccaactttccagcctgcgtgagcagatgaacagcatgaagcaactggcggcggacggttatttgccgcgcaaccgttatctggaagtccagcgccagttcgctgaggtgaacagcagcatcgatgaaaccatcgggcggattggtcaattgcaaaagcagctgcaggaatctcagcagcgtatcgatcagcgcttcgccgactatcagcgcgaggtcaggacgcaactggcgcaaacccaaatggacgccagcgagttccgcaacaagctgcaaatggccgacttcgatctgggcaacaccgccatcacctctccggtggatggcaccgtggtcggattgaatattttcactcaggggggcgtcgtgggagcgggggaccacctgatggacgttgtacccagccaggcgacgctggtggtggattctcgcctgaaagtcgatttgatcgacaaggtgtacaacgggttgccggtggatctgatgtttaccgccttcaaccaaaacaaaaccccgaaaattccggggacggtcacgctggtttccgccgaccgcctggtcgacaaagccaatggagaaccttactaccagatgcaggtcacggtctcgccggagggcatgaagatgctcagtggcgaggacatcaagccggggatgccggtcgaggtgttcgtgaaaacgggctcacgctcgctgctgagttatctgtttaaacctattttggatcgcgctcatacttcattaaccgaggaataattttgattcaatcaaaacgacaggctgccggtctggttatcggcacccttttgtttgcgatatctgcgccggtttattcgatagggattttagacgcatattcgctggcattagaaaaggacccgacctaccgggcggctataaaagagaaagaagcgggagatgagaacgaaaacatcggcagggcggggctgctgccgaaggtatcgctgaactaccagaattcgccgcgcaactggcaaacgcagaagtacccggcgagtgacatttttggaaatagccttggagaggcaaccaagcgacaacagtatcgcagccattccagttcgatcacgctgacgcagccgctattcgactatgaagcctacgcccgctacaaagccggcgtggcacagacgatgatgtcggacgagcgctatcgcggcaagttgctggatctcgctgttagggtgattaacgcctatgttgaagtcgcctattccaaggatcaaatcgcgttggccgaagcgcaaaaggcggcttacaaggaacagctgaccttgaacgatcgcctgatgagcgcgggtgaaggcaccattaccgacgtatcggaaacccaggcgcgctacagcctggccgaagcgcaggtaattgaagcacgcgacgcgctggacgccgcacagcgcgagctggaagtgattatcggcatgccgctgaaccaactggatgaattgcaggttttgcggccgggcaagttcaaggtggcaccgctgatcccgtccaagttcgaagattggcagaagatcgcgctggagaacaacccggtgctggccgcgtcgcgtcatggcgtggatgccgccaagtatgatgtcgaaaggaatcgtgcgggctttatgccgcaggttcagctgtatgcttcgcattcggaaaacgattccagcagcgataatacggttaaccagaaataccgtaccgacagcatcggcgtgcaggtcagcatgcctatttattccggcggcggcgtttcggcgtcgacccggcaggcggcggcgcgctatggccaggcgatgtatgaaatggatgcacagacgggcaccacgctcaacgatctgcgcaagcaatacaatttgtgcatcagcagccgcgccaaggtggcggcctatgagttggcggtgcaatcggctactacacaggtgacggcgactcggcagagcgtgctggccgggcaacgtgtcaacgtcgatgtgctcaacgccgaacagcagctctatagcgcccagcgcgatctggcttccgccaagtacgcctacatcaaatcatggatcaccttgctgagcgactccggtacgttggatgaaaaagatgttatgcgggtcgcgcagtattttgcccgcagtcgctagcaacatattcactatgagcattaatctgaaagagcagcgctatgctgctctttttttgttaatacgttatgttatcggcaggttgttcctcctgtgtttttactcgcctggtttatttctgaacataattcctggcaaagggcggtaggttaggggaatttatactttagcaaaatgtagcgattggtcgacgatcgtacgaattttagaatgatgctgctgatgagtggcgtcgtccttataagaacgatgactgagtaaagggtagataatgtccaaactaatccctgtggttatggccggcggtactgggagccgtctgtggccgatgtcgcgagaatcgttccctaaacagtttctttctattgatgacagtgggatgagcctgctgcaacagacgttacagcgcttgtcggggctgggcggtattgaaattgccgctcctttggtcatttgcaatgaggaacatcgttttttggttgccgagcaattgcgtgaaatcggacaattagcgaccaatatcattttagagcccgtagggcgcaataccgcgccggcagtggcgttagccgctcatctggcagcggaagaagacgaagacagcatgctcttggtgctggctgcagatcatctgatcacgaaggtcgataattttcacgcggcgatccagacggctatctcgtttgcaggcaataaccatctggtcacgtttggcattattccggaacatccggaaaccgggtacggctacatcaaacgcggcagtcacctgtccaatgattgtttcaaggttgattcattcgtggaaaaaccacgtttggagaaagcgatcgaatacctcgccagcggagattatagctggaacagcggtatgttcatgtttaagaccgccaagttcttacaggaattgcggcagttcagtcccgacatctttagcacaacccagcagtctgtgggtaagagccaacgcgacatgaattttatccgggttgagcaagacatcttcaaacactgtccaagtgattccatcgactatgcggtgatggaaaaaacgcgtgatgccgtagtgattcccattgatgccggctggagcgacgtcggctcctggtcttcactgtggaacgtttccgaaaaagatccgttgggcaatgtcaacgtgggtgacgttatttcgatcgactccagtgacaattacatttcgtcggagtctgcgttggtggcaaccattgggttggaaaatcttatcgtggtcaacaccactgacgccttgctgatcgctcacaaggataaagtacaggatgtaaagaaagtggttgatgagcttaaaaagcgcaatcttcatcactttcgccaacattccaccgcctaccggccctggggcaagatttgcgacatcgacagcggcacgcacttccaggtgaagaaaatcattgtgcggccaggggagggattgtcggtgcaacgccatctccaccgtgccgaacattggatcgttgtgagtgggacagcaagagttaacgttgatgatcaagagttcttcttgtcggaaaatcagtctaccttcattcctgcgggcagtgtccatacgctagaaaacccgggaaaaatcgatttggaaatgatcgaggtcaggtcggggcgctatctggaagaagatgatattgagcgtttgcaagatcgctatggcagaatttaacagggtttggtaatgcaaaaattgacgtgttttaaagcttatgacatccggggaaagctgggtgaagagctgaatgaggacatcgcgtatcgtattggacgtgcctatggcgagtttttgaagcccaaacggatcgtgttgggctgcgatgtgcggttgaccagtgaaagcctgaaactggcgctggcgaaagggttacaggattcaggcactgatgtgatagacatcggtttaaccggtaccgaagaaatctatttcgccacaacctatttaaaagccgatggtggcgtggaagtgaccgccagccataatcctatcgattacaacggcatgaagttagtgcgcgaaggctctcgcccaatcagcggcgataccgggctacgagcgattcaagaactggcggagaaaaatcactttcaggcgccggcagcaacgcgcggtagctatgtccgccaggacgtattgggggcttatgtagagcacatactgtcttacgtcgacgtgaaaaacttcaagccgttgaagctggtgctcaactcgggcaacggtgcggcagggcatgtgattgatgccatcgaggcgcaactcaaggcgcggggcgtgccgttggaatttatcaaggtgcatcaccagccggacggggctttccctaacggtattcccaaccctttgctgcctgaatgtcgcgcggataccgccgatgcggtgcgtgagcatggcgctgatatggggatcgcgttcgacggcgatttcgatcgctgcttcctgttcgatgaaaaaggcgatttcattgagggttattacatcgtcggcttgctggcggaagccttcctgcagaaacagccgggagcgaagatcatccacgatccgcgtctgagttggaataccgtcgatgtggtcaccgatgcgggtggcgtgcccgtgatgtcgaaaaccggccatgctttcattaaggaacgcatgcgtgcagaagacgccatttatggcggtgagatgagcgcccaccactatttccgtgattttgcttattgtgacagcggcatgatcccgtggctgttggttgccgaactggtcagtgtgaaaggacaaactttggggcaactggtacaggatcgcattgccgcctacccgtcttccggtgagatcaatatcaaactggcacagccggccgtgtccattgaaagcgtcaagcaatactatttggctcaagcggatgaggtagactataccgatggcatcagcatgtcgttcgcaaactggcgtttcaacctgcgttcctccaatacggaacctgtggtgcgtcttaatgtcgaatcgcgcgccgatgttgcgctgatgcaagcgaagaccgacgagattttggcgttgctcggtgcacaaatttaacgcttaatacattgaatagtctaggatgagagcggttttaccgctttctcttcatggtacgcccagaaggttgtatgatgcgcccggtatcgatgagggcgtttttgtcgaatcaagaatgttgcgaagtataagggggggatatggcaattttagttaccggtggtgctggttacatcggatcgcacaccgtgctatcgctcctggagcgtggcgaggacgtcgtggtgttggataatttgtccaactcatctgcggagtcattgcagcgggtggagaaactgtcggggaaagccgcagagttccatcagggagacgttcaggatgccgaatgcctgcagcgcatctttggcgctcatgagatcactgccgtgatccatttcgccggtcttaaggcggtaggggagtcaacgcgcaagccgctggagtattatcagaataacgttaccggcacgctggtgttgttggatgctatgcgtcgtgccggcgtgcacgactttatctttagctcttctgccactgtctatggtgccaattcgccggtaccttatgtagagacgacaccgatcggcgggacaaccagcccttatggaacatcaaagttgatggtggagcagatcctgcaagatttcgctaaagcagagcctcagttctcgattatcgccttgcgttattttaatccggtaggtgctcacgagtccggtttgattggtgaagatcccaatggcattcccaataacctgctgccgtacatctcacaagtggctatcggcaagctggagaagctgggcattttcggtggggattatccgacaaacgatggaacgggagaacgcgattacatccatgtcatggatctggccgaaggccacctgaaggcgatggatcatctgccaaagatcaatggatttaaggcctacaaccttggggctggcgtagggcattcggtgctggcgatggttcaggcgtttgagaaagcgtcaggcgtaacgatcccttatcagatcttgccacgtcgcgatggcgacctgcctgctttctgggccaatgccgatctggcttatcaggagctgggatggaaagtcagccgaggcattgatgatatgatgcgcgatacttggaattggcagcgcactaatccacaaggttaccaaaagtaataccttacagataagctccctctctttgttagatcatgattgcggtttgcgatcgcaatcatgcatcccaccaggatacacattctttaaatattataacgtatttaacaatgcgatcgcgattgttacacgggttaagcccttttcgggcgctgagtgagcgttcatctcagataagcctgaaaaagcggataatctacaggtgttttgatggctaaggtggtagcatacgcagcaaaaatatttattatatccgtcccctatacctgacaaggggggacacgagtatggcttttcgtgccatatgcgaggtacaacagtgtggcgagttttggccatggataaaattcaaaagcaagatcagtcggttggtagctgttgagccaagggcggtagcgtgatttttgcaggccttcgtcaccgtgagaggttgagtaatctcctgtattatcactgccagcgaaatgcccttcgttgctgtttggccttcatctaagcactgcataaggcaacagtaagcgcgataattgaacgttatgtattggtgtgacctaacttaacatattgtatttaaagctttatatatttttagcgtcataaggacaaaaaatgttattacctgtaattatggcaggcggtactggtagccgtttatggccgatgtcacgagaactccaccctaagcagtttttgcgcttgcacagcgtaaattcaatgcttcaggaaacgttgaaacgactcgatggcgtggagatcggtgagcctgttgtaatctgcaacgaagaccaccgttttatggtggctgaacagctgcgtcaaattgatatgttgtcacacaacattatcctggagcccattggcagaaatactgcgccagcgattgctttggctgcattgaatgctaccgcagcaggtaacgatcctatcatgctggtattggcagcagaccatatcatcaaggatgttaatgttttccaccaggcgatcgaagcagcattgccttacgcagcggaaaaaagcctggttacgtttggtattgtgccgacaggtccagaaactggttatggttacatccagcgtggagagtgctgcgatgataaagcggtggccgctaacgtaaaacgttttgttgagaaacctgatctcgcaaccgctcaggcctatgtcgactccggtgaatatttttggaacagtggtatgttcatgttccgtgccaagcgttacctggaggaactggaggcattccgtcccgatatcctggctgcctgtcgccgctcgctggatgataccgaatgtgacaaaaactttatcaatgtcaatcgcgacgcctttgcgagttgcccagacgagtcggtcgattatgcggtaatggaaaaaacacaagatgcggtcatgatcccgctggatgccggttggagtgatgtcggctcatggtctgcattatgggaagtcagccagaaagatggggctggtaatgcattgaccggcgacactttcctgcataatacccgtgattgctatatcaatactgatgaaaaattagttgcggctgttggcgtagataatctggttattgttaacactaaagatgccgttctcgtggttgataagtcgaaagttcaggacgttaaaaaagttgttgagtatctgaaaaaacataagcggagtgaatatcgaagacaccgcgaggtttatcgaccatggggtatttgcgatattttggttgctgaaaagcgttttaatgtcaatcgtatcaccgttaatcccggggaagcattttctctgcaaatgcaccatcaccgcacggaacactgggtggttctttctggtacggctaaagtaacaacgggggataaaacgttcttacttaccgaaaatcagtcgacattcattccaattggggttgtccaccgtttagaaaatcccggaaatattcctttggagctgattgagattcagtcaggctcttatttaggtgatgatgacattatccgtattaaagatcattacggtcgttgctaatttttgaggttttaatgagtgccttaacttgttttaaagcgtatgatatccgtggtcaactaggtgaagagctgaatgaggatattgcctatcgtatcggccgagcttatggcgaatacctgaaacctcagcgcgttatcgtaggtggcgatgtacggctgaccagcgagtctcttaaagtggctctcgccaacggattgcaggatgctggtgttgacgtatatgacattggtatgagtggcactgaagaagtctattttgccactttccatttgaatatggatggtggcattgaagttactgctagccacaatccaatgaattataatggtatgaaactggttaaggcaaatgctcagccgattagtggtgataccggtttatttgcgattaaaaaattagcggaagaaaatacgtttcctgcggtagtgaaggataaatgtggtagttatcaacaaatatccattctcaccgattatgtagatcatttgctgaagtatattgatgcaacagcattgaagccaatgaaattggtcattaactctggaaatggtgctgcaggccatgttatcgacgaaatagagcgacgtttccagcaagaaaatattcccgttacctttgtaaaggttcatcatcaacctgatgggaatttccctaacggtatccctaacccgttattacctgaatgtcgggatgacacagcaaaagccgtgcttgagcatcaggcggatatgggaattgcttttgacggtgatttcgatcgttgtttcctgtttgatgagaagggcgctttcatcgagggctactatatcgttggcctattggcagaagctttcctgcaagccaaccctggctccaagattattcatgatcctcgtctgtcatggaataccatcgatatcgttacccaagctggtggcatccctgttatgtccaaaacggggcatgcctttatcaaggagcgcatgcgcaaagaagatgctatctatggtggcgagatgagtgcgcaccattacttccgtgatttcgcttattgtgacagcggtatgattccatggctattggtagcgggtttactttcagttaaaggcagtgtgttgagtcagctagtgaaggatcgtatggaagcgtatccagcatctggtgagattaatcgcaaattgcctgatgctaaagctgccattgagcgtgttttaggcgtttacaaagatgatgccgtggcttttgacatgacagatggtatcagccttgaattcaatgaatggcgttttaatctgcggacatcgaatactgaacctgttgtacgtttgaatgttgagtcaaaaggggatgttgaattgatgcagaaaaaaactaaagagattctggcgctcttaggcggagaataacgatgaaagaaatgttattagccatctatggttaccggggttttatttggagcagtattaagcgggactttcagtcccgttaccaaaccagcatgttgggagctttatggctggtattgcagccgttagcgatgattttggtatatacactggtattctcagaagtgatgaaggcacggatgcctgataattcaggtccttttgcctatagtatttatctttgctctggggtgctgacgtggggattatttactgaaattcttgataaaagccaaagtgtcttcattactaatgctaacttaataaaaaagctcagcttcccaaaaatttgcttaccggtcattgtgaccgcgtctgcgattttaaacttcgccattatatttagcctgtttttaatttttcttgtttttaccggaaactttcccggggttttattcttctccgtcttacccgttttggctctgcaagttctgttcaccgtcggtctgggtatgacattgggcgtgatgaacgttttcttccgggacgttgggcagtttgttggcgtattattgcaattctggttctggttcacacccatcgtttatgtattaaattcgctgcctgaatgggccagaacatcgctgatgtacaatccaatggcccgagttatgcaagcataccagtcaatatttgcataccaacagcaacctaactggtactcattatggccagtattggttctggccataattttctgtgcgtttggtatgagattgttcaggaaacacgctgcagatatggtggacgagttataatgagttacataaaagtacataatgttggcaaggcatacaaacagtatgcctctaagacagggcgtctgcttgagtggatttcgccatttaacaccgtcaaacataaactaaaatggatcctgcagaacatcagttttcatgttgagcctggtgaggcgttaggcattattggtattaacggtgccggtaaaagtacattactgaaattgattactggcacagcgaaaccaacctgcggcgaaattgctctcgacggtcgagttgcggcattattggagctcggcatgggctttcactcggattttaccgggcgccaaaacgtttatatgtcagggcaactgctgggtatgtccgtcgaaaaaattacggaacttatgccggaaatcgaggcgttcgctgagatcggtgattatatcgatcaaccggttcgtgtttactcaagcggtatgcaagttcgattggcatttagcgttgcaacagcgattcgcccggatattttgattgttgatgaggccttatctgttggtgacgcttattttcagcataagagtttcgagcggatacgtgagtttcgcaagctaggaaccaccctcttgctcgtgtcacatgacaaacaagcgatccaaagcatatgtgatagagctattttgcttaacaaaggcagagtagaaatggagggtgagcctgaagcagtaatggattactataatgccctactcgctgataagcaaaatgtgtcgattcgtcaggttgaaaataatggaaaattgcagacgctctctggctcaggcgaggcaactattaccgatattagtcttcttagtaccgaaggtgaaagtattgaggtggtagcggtagggcaacctgtcaaccttcaggtgaaggtgcatgtcaatgaggctgttcctgaacttgtcgtgggatatttgattaaagaccgattgggacagccggtttttggtaccaatactcatcatctgaaacagccattattcgatttgaaagagaatgaatcgagaaccttttcatttgcgttctctgccaatttgggggttgggtcttactcggttgccgtagcgttacatacggcaggaactcatgttggaaaaaattacgaatggcgcgatctggcggttgttttcaacgttgttaattcaaacgagaaagattttattggagtagcttggttgccccctaagttggagatttttgaatgagtggtaatttttatcgcgtttttgaggaaaaacatcgggggagcgtgcaagatatcaaacaacgcttatctgtatatcttccttttattatggcgttggcaaaaatttacccttcagctgaagttgtcgatgttggctgtgggcgtggagaatggctcgagatcttacgagataatgctattcctgccatgggggttgatctcgatgatggtatgctcgaacgtgctttgcaggtcgggctgaacgtgaagaaaatggactgcctggatttcctccagcagcaggaggacggcagtctactggccatcaccggttttcatatcgcagaacatctgcccttcgagtttttacagtctttggtgaaagaggcgttgcgggtgcttaaacccggtggtttgctgattctggagacgccaaaccccgaaaatgtaagcgttggaacctgttctttttatatggatccgacgcacaaccatccgctgcctccagcgttgctcgaattcattccgaactattacggttttctgagaactaaaatactgcgtttgcaggaaaaagcggcactgagagacgaagagacatcggtatatttggtcgatgtgttgaaaggtgtcagcccagactatagcatgattgcccaaaaagagggtgaggcatcgattgtcggtgagttggacgcctattttgataaagaatatggggttactctcgacggcttaagcgatcgctatgacctacgcttgaataacgagtttaagcgaatgaacacggcgttgcgtgcgcaggcagtgaagttccacgaagtgagtaaccaattggagcgttttcagcaccaattggacaagtcacatcaagagctgatggctgtacatgctaataatcaaagcctacagcagcagctcattgacgtgcatgctaacaatcagagtctgcaacaacagctttttgatgcgcataccagcaattcctggcgtgtgacctccccattgcgttgggtttcatatcaatttaaagcggtacgtgagcaaggcgttaaaactcgagctcgcaaagcagccaaaaaggttttgagaaagggaataaatacggctctggctttattccatgaacatcctaaattcaaagcattcattctttccagcgctagaaagctgggtgcttaccgatttctgcaatctgttttcagacgggttttaatttccgcacctgactatcacgccgatcttatggtgaatgaacgtcatgttgtgtataaggaaaatatgacgagcagagctatcgatatatatgagcagctaaagagaataaataataagaaacacggggattcataatgcgtattgttattgacctgcaaggagcacaaacggaaagccgttttcggggtattggccgttatactctttcgattgcaaaggcaatcatccgtaataacagtcaacacgaaatttttattgctttgtctgcgctgtttcccgaaaccatcgctgaacttaaagcgcaatttgctcgcttagtgccggccgaaaatatcgttatctggtatgcgcctggccctgtcagagcgatggatagaaacaatgcttggcgcagtgagtgtgcagaatatgtgcgtgaagccttcttacataatcttaaacctgatgtcgtttttataaccagtttgttcgaagggcatgtagataatgcggtgacgtcgatcgctaaattaacgccaaaaactaaagtggcgg
